United States Patent Application Publication US 2008/0305493 A1 - sequence listing, part 2

SEQ ID NO: 1899 - DNA, 1138 bp, Artificial
  cDNA Sequence
ccaggtcatcctggcccggcagtatggctccgagggcaggttcactttcacttcccatacccctggtgagcaccagatctgtcttcactccaattccaccaagttctccctctttgctggaggcatgctgagagttcacctggacatccaggtaggtgaacatgccaatgactatgcagaaattgctgctaaagacaagttgagtgagttgcagctacgagtgcgacagctggtggaacaagtggagcagatccagaaagagcagaactaccagcggtggcgagaggagcgcttccggcagaccagtgagagcaccaaccagcgggtgctgtggtggtccattctgcagaccctcatcctcgtggccatcggtgtctggcagatgcggcacctcaagagcttctttgaagccaagaagcttgtgtagctgtcccaggcgtcacaacccatcctcccaggctgggggagaaaggacctcctggaactgacttcttctgtcaggaggactggtttccagccatacctgttctggaagggagaggggctggaggcacccacaggcacaagctgaaggcagcagcttggctaatactgagcaggtagtggggcaaattcctgccctctctctctggcctctgggccgtttggtagtaatcacccaggggctggtaaagcccctcctcttggcacctcagaatcacagtgttactgatcagggatgtgaggctgctgttgggggtggggggaggggaatgggcaggcaagccagtcttctgtcttcctttgctaacttagggttttgagcaggttggggtatggtgcctgtcatacccacctgccaccctgggaacctcactgttctctctttcagcctagacctgctgatccagggtgtgtgtgagttgagggtgggtggaggggtttgcagtgtgggaatgtggccctgcagttgacctgagctgcttcacatggttgtccattctggggcttaaagaactgggaccagaccaagtagaggccttggtgctggttggggtggggcctgcagagtcttagttactgatttcattttcaataaatgtaggtttgttacatgagtttcccaataaaaaaaaaaatgacttcttgtccagtgcaa

SEQ ID NO: 1900 - DNA, 709 bp, Artificial
  cDNA Sequence
ttcacttcccatacccctggtgagcaccagatctgtcttcactccaattccaccaagttctccctctttgctggaggcatgctgagagttcacctggacatccaggtaggtgaacatgccaatgactatgcagaaattgctgctaaagacaagttgagtgagttgcagctacgagtgcgacagctggtggaacaagtggagcagatccagaaagagcagaactaccagcggtggcgagaggagcgcttccggcagaccagtgagagcaccaaccagcgggtgctgtggtggtccattctgcagaccctcatcctcgtggccatcggtgtctggcagatgcggcacctcaagagcttctttgaagccaagaagcttgtgtagctgtcccaggcgtcacaacccatcctcccaggctgggggagaaaggacctcctggaactgacttcttctgtcaggaggactggtttccagccatacctgttctggaagggagaggggctggaggcacccacaggcacaagctgaaggcagcagcttggctaatactgagcaggtagtggggcaaattcctgccctctctctctggcctctgggccgtttggtagtaatcacccaagggctggtaaagcccctcctcttggcacctcagaatcacagtgttactgatcagggatgtgaggctgctgttgggggtggggggaggggaatg

SEQ ID NO: 1901 - DNA, 709 bp, Artificial
  cDNA Sequence
atccaggtaggtgaacatgccaatgactatgcagaaattgctgctaaagacaagttgagtgagttgcagctacgagtgcgacagctggtggaacaagtggagcagatccagaaagagcagaactaccagcggtggcgagaggagcgcttccggcagaccagtgagagcaccaaccagcgggtgctgtggtggtccattctgcagaccctcatcctcgtggccatcggtgtctggcagatgcggcacctcaagagcttctttgaagccaagaagcttgtgtagctgtcccaggcgtcacaacccatcctcccaggctgggggagaaaggacctcctggaactgacttcttcttcttctgtcttcctttgctaacttagggttttgagcaggttggggtatggtgcctgtcatacccacctgccaccctgggaacctcactgttctctctttcagcctagacctgctgatccagggtgtgtgtgagttgagggtgggtggaggggtttgcagtgtgggaatgtggccctgcagttgacctgagctgcttcacatggttgtccattctggggcttaaagaactgggaccagaccaagtagaggccttggtgctggttggggtggggcctgcagagtcttagttactgatttcattttcaataaatgtaggtttgttacatgagtttcccaataaaaaaaaaaatgacttctt

SEQ ID NO: 1902 - DNA, 1041 bp, Artificial
  cDNA Sequence
aggcaggtggagcaagatggctgtggagctgggcgtgctgctcgtccggccccggcccggaaccgggctgggtagagtgatgcggaccctcctgctggtgctgtggctggcgacgcgcggaagcgcgctctactttcacatcggagagacggagaagaagtgctttattgaggagatcccggacgagaccatggtcataggaaactaccggacgcagctgtatgacaagcagcgggaggagtaccagccggccaccccggggcttggcatgtttgtggaggtgaaggacccagaggacaaggtcatcctggcccggcagtatggctccgagggcaggttcactttcacttcccatacccctggtgagcaccagatctgtcttcactccaattccaccaagttctccctctttgctggaggcatgctgagagttcacctggacatccaggtaggtgaacatgccaatgactatgcagaaattgctgctaaagacaagttgagtgagttgcagctacgagtgcgacagctggtggaacaagtggagcagatccagaaagagcagaactaccagcggtggcgagaggagcgcttccggcagaccagtgagagcaccaaccagcgggtgctgtggtggtccattctgcagaccctcatcctcgtggccatcggtgtctggcagatgcggcacctcaagagcttctttgaagccaagaagcttgtgtagctgtcccaggcgtcacaacccatcctcccaggctgggggagaaaggacctcctggaactgacttcttctgtcaggaggactggtttccagccatacctgttctggaagggagaggggctggaggcacccacaggcacaagctgaaggcagcagcttggctaatactgagcaggtagtggggcaaattcctgccctctctctctggcctctgggccgtttggtagtaatcacccaagggctggtaaagcccctcctcttggcacctcagaatcacagtgttactgatcagggatgtgaggctgctgttgggggtgggg

SEQ ID NO: 1903 - DNA, 1444 bp, Artificial
  cDNA Sequence
ggaggccgggccggccgggctgcgagcgcctgccccatgcgccgccgcctctccgcacgatgttcccctcgcggaggaaagcggcgcagctgccctgggaggacggcaggtccgggttgctctccggcggcctccctcggaagtgttccgtcttccacctgttcgtggcctgcctctcgctgggcttcttctccctactctggctgcagctcagctgctctggggacgtggcccgggcagtcaggggacaagggcaggagacctcgggccctccccgcgcctgccccccagagccgccccctgagcactgggaagaagacgcatcctggggcccccaccgcctggcagtgctggtgcccttccgcgaacgcttcgaggagctcctggtcttcgtgccccacatgcgccgcttcctgagcaggaagaagatccggcaccacatctacgtgctcaaccaggtggaccacttcaggttcaaccgggcagcgctcatcaacgtgggcttcctggagagcagcaacagcacggactacattgccatgcacgacgttgacctgctccctctcaacgaggagctggactatggctttcctgaggctgggcccttccacgtggcctccccggagctccaccctctctaccactacaagacctatgtcggcggcatcctgctgctctccaagcagcactaccggctgtgcaatgggatgtccaaccgcttctggggctggggccgcgaggacgacgagttctaccggcgcattaagggagctgggctccagcttttccgcccctcgggaatcacaactgggtacaagacatttcgccacctgcatgacccagcctggcggaagagggaccagaagcgcatcgcagctcaaaaacaggagcagttcaaggtggacagggagggaggcctgaacactgtgaagtaccatgtggcttcccgcactgccctgtctgtgggcggggccccctgcactgtcctcaacatcatgttggactgtgacaagaccgccacaccctggtgcacattcagctgagctggatggacagtgaggaagcctgtacctacaggccatattgctcaggctcaggacaaggcctcaggtcgtgggcccagctctgacaggatgtggagtggccaggaccaagacagcaagctacgcaattgcagccacccggccgccaaggcaggcttgggctgggccaggacacgtggggtgcctgggacgctgcttgccatgcacagtgatcagagagaggctggggtgtgtcctgtccgggaccccccctgccttcctgctcaccctactctgacctccttcacgtgcccaggcctgtgggtagtggggagggctgaacaggacaacctctcatcacccccacttttgttccttcctgctgggctgcctcgtgcagagacacagtgtaggggccatgc

SEQ ID NO: 1904 - DNA, 363 bp, Artificial; identical to SEQ ID NO: 1658
  cDNA Sequence

SEQ ID NO: 1905 - DNA, 780 bp, Artificial
  cDNA Sequence
gccagttccctggacaatcccagctgcttcatcttggactgacatggacaccaggcagtaacaccagctcttgggagttggtgggaacaggtgtaatatcaaagctcccagctctgcactctcctgtcacataggaagacctcagaaaatggaggttccttcctttccacctgcactgggggagtgcaatgagcagaagaaaagcgaaggtccctccaccttctgagatcagctgacacctgagcttaggtgcatccctagccctgcagcctgttgcttcccttgaccgccacccccacctccatcttcaaggctgtgctgggcactccaggctgggcctgacgcgttccaaatctgcagctcccctcactctgcatcctgggcctccaccactctccaggagagtgggagacgcctgagccatgggtggcgagaagcggcagtcctgtgccgcctcagtgccccacttgcctccttcgtggaatggacttgacatccctgccttgctggccagggcgtggccgaaacctacccaggatgtaggagcacctggcacagcgcttggccagtgaggcggtggttgcaataataataaccatcccttgttgaacattcaccagataaccaaattctccacaccgcatttcacttaggcctccctacctaagagctgggtcctaattcactggttctgtacatcaggaaggcaaagcacagacaggcaactgtctcctgcctccagtgcatcagagtctggagcgcgttgcttctctggaggga

SEQ ID NO: 1906 - DNA, 1507 bp, Artificial
  cDNA Sequence
ctggggagctcggcatggcggtccccgctgcagccatggggccctcggcgttgggccagagcggtcccggctcgatggccccgtggtgctcagtgagcagcggcccgtcgcgctacgtgcttgggatgcaggagctgttccggggccacagcaagacgcgcgagttctggcgcacagcgccaaggtgcactcggtggcctggagttgcgacgggcgtcgcctagcctcggggtccttcgacaagacggccagcgtcttcttgctggagaaggaccggttggtcaaagaaaacaattatcggggacatggggatagtgtggaccagctttgttggcatccaagtaatcctgacctatttgttacggcgtccggagataaaaccattcgcatctgggatgtgaggactacaaaatgcattgccactgtgaacactaaaggggagaacattaatatctgctggagtcctgatgggcagaccattgctgtaggcaacaaggatgatgtggtgacctttattgatgccaagacacaccgttccaaagcagaagagcagttcaagttcgaggtcaacgaaatctcctggaacaatgacaataatatgttcttcctgacaaatggcaatggttgtatcaacatcctcagctacccagaactgaagcctgtgcagtccatcaacgcccatccttccaactgcatctgtatcaagtttgaccccatggggaagtactttgccacaggaagtgcagatgctttggtcagcctctgggatgtggatgagttagtgtgtgttcggtgcttttccaggctggattggcctgtaagaaccctcagtttcagccatgatgggaaaatgctggcgtcagcatcggaagatcattttattgacattgctgaagtggagacaggggacaaactatgggaggtacagtgtgagtctccgaccttcacagtggcatggcaccccaaaaggcctctgctggcatttgcctgtgatgacaaagacggcaaatatgacagcagccgggaagccggaactgtgaagctgtttgggcttcctaatgattcttgagaggaggttgtagggagaggaggccccggcagaggtcttccttcatgtggttagtttggtctgttctctcggagttggtgggcaccctaaatatttgtaagttggtataaattgtaaacgtctctggtcaggctgcgcatttcgttcttttgctttgtctgtgtattagctctttccattctttgcccccagcatgagttaactcgcgtggactctgcagtgcgagtagtgaccccagcataccttgtcctctggacctcctgtcttctctgcttctgggtgcatggtagactttgtggcatttgatacaacttggacaatacctagtttggagggaggggaatggaagggcatggaagtttttttaaataattaaaaaaatatatatataattttgagaattgagcatttaataaactgacttttgttattatggaa

SEQ ID NO: 1907 - DNA, 587 bp, Artificial
  cDNA Sequence
cagtctctgaggaagccacaggggttcacatgatgcaggtggacccagccacaccggcaaagaaattggaagactccaccattacaggcagccaccagcagatgtcagcaagtccttcctctgcacctgcagaagaagcaacagaaaagaccaaagtggaagaggaagtgaaaaccagaaagcccaagaagaaaaccaggaagcccagcaagaaaagccggtggaatgtcctgaaatgttgggacatttttaatatattttagagacctctgaagattcctcgaccaccaggaagggccccgacgtggggatgtcaacatggctcagacttgatgtggatcgtgatcatttcgggaaatgtgttactccaaaaacttttataatctttgcttaatttgtttttaaatactttcctggctgggcgtggtggcttatgcctgtaatcccagcactttgggaggccgaggcgggtggatcacctgaggtcaggagttcaagaccagcctggccaacaaggtgaaaccccgtctctactaaaaatacaaaaattagctaggcgtggtggcgcactcttgtagtcccagcta

SEQ ID NO: 1908 - DNA, 580 bp, Artificial
  cDNA Sequence
ctttaacctctgtttttcagagggcacaaattgttcttgtattgtttccattttacatttttttcttgaagttattttccaattgttttcattctttctgaagttttgtttactcagttttaagtttttgtaattttgatagacttttgtgctttcattttcttaatgacttttacctcatttttaaaacaaatccatagtatggatgatattgatgatgaaatgtcttacgatgatcatttagaggtttattttgaacaactggcaattccacgaatgatggaataaaacatatgaagtagaaggactggaacctccagaaaaagtactttaagttacctacaggtgatcctagtcaggtatgaattgataagaaatgcctgcaccttccctccttcctatctttcccttgcctacagaaaattaaaaggcaaaacaatggacatctacatattcttcattcagatcaaccagtggctagcatttgccaccttttgcagtttctttctctttccataagtactttcttctctgaatcatttgaaagtaagcaaatgaaaacagtagcctaaagtgtcag

SEQ ID NO: 1909 - DNA, 553 bp, Artificial
  cDNA Sequence
atttttttcttaattttattgactcatttatgtcttagtcttttttattacaaattatttattgttcagtcactaccttagagcctgttttattttttcttaattttattaaaggatgatattgatgatgaaatgtcttacgatgatcatttagaggtttattttgaacaactggcaattccacgaatgatggaataaaacatatgaagtagaaggactggaacctccagaaaaagtactttaagttacctacaggtgatcctagtcaggtatgaattgataagaaatgcctgcaccttccctccttcctatctttcccttgcctacagaaaattaaaaggcaaaacaatggacatctacatattcttcattcagatcaaccagtggctagcatttgccaccttttgcagtttctttctctttccataagtactttcttctctgaatcatttgaaagtaagcaaatgaaaacagtagcctaaagtgtcagtttcaaccagaaaataacagctctgatttctcatggctcacactcttctgaaacgactcgggt

SEQ ID NO: 1910 - DNA, 831 bp, Artificial
  cDNA Sequence
gatgagggcggccctgagcccgagcccagcctgtccgactcctccagtgggggtagttttggtcgcagtcctggtactggccctagccccttcagctcctcccttggccaccttaaccacctcgggggctccctggaccgggcctctcaaggacccaaggaggctgggccaccagctgtgctgagctgcctgcccgagccaccacccccctacgagttctcctgctcctctgccgaggaaatgggagccgtgctgcccgagacctgtgaggagctcaagaggggccttggcgatgaggacggctccaaccccttcacgcaggtgctggaggagcgccagcggctgtggctggctgagctgaagcgcctgtatgtggagcggctgcacgaggtgacccagaaggctgagcgcagcgagcgcaacctccagctgcagctgtttatggctcagcaggagcagcggcgcctgcgcaaggagctgcgggctcagcagggcctggctccggagcctcgggcccccggcaccctcccagaggctgaccccagtgcacgaccagaggaggaagcccgatgggaggtgtgccagaagacagcagagattagcctcttgaagcagcagctgcgtgaagcccaggcggaactggcccagaagctggcggagatcttcagtctgaagacacaacttcggggcagccgggcacaagcccaggctcaggacgcagagctggtccggctgcgcgaggctgtgcgcagcctgcaggagcaggcccctcgggaggaagccccaggcagctgtgagactgatgactgcaagagcaggggcctgctaggg

SEQ ID NO: 1911 - DNA, 1965 bp, Artificial
  cDNA Sequence
ctcggccggcctcccgggccccagccttctccagaacccctgctacccacgactaagccccgaacaatctgcccttgggcttgttctcttcgcagttgtcggccctgggccgggagctggagtcccagactcataggtcccggcccagcccccgaagagccgcctcagccggggggagttgctcggactcaaacgtccagtcctcgtgcgaccgcgctgggtcggaagtgagcaggctgaggccaccatggagcagtgtgcgtgcgtggagagagagctggacaaggtcctgcagaagttcctgacctacgggcagcactgtgagcggagcctggaggagctgctgcactacgtgggccagctgcgggctgagctggccagcgcagccctccaggggacccctctctcagccaccctctctctggtgatgtcacagtgctgccggaagatcaaagatacggtgcagaaactggcttcggaccataaggacattcacagcagtgtatcccgagtgggcaaagccattgacaggaacttcgactctgagatctgtggtgttgtgtcagatgcggtgtgggacgcgcgggaacagcagcagcagatcctgcagatggccatcgtggaacacctgtatcagcagggcatgctcagcgtggccgaggagctgtgccaggaatcaacgctgaatgtggacttggatttcaagcagcctttcctagagttgaatcgaatcctggaagccctgcacgaacaagacctgggtcctgcgttggaatgggccgtctcccacaggcagcgcctgctggaactcaacagctccctggagttcaagctgcaccgactgcacttcatccgcctcttggcaggaggccccgcgaagcagctggaggccctcagctatgctcggcacttccagccctttgctcggctgcaccagcgggagatccaggtgatgatgggcagcctggtgtacctgcggctgggcttggagaagtcaccctactgccacctgctggacagcagccactgggcagagatctgtgagacctttacccgggacgcctgttccctgctggggctttctgtggagtccccccttagcgtcagctttgcctctggctgtgtggcgctgcctgtgttgatgaacatcaaggctgtgattgagcagcggcagtgcactggggtctggaatcacaaggacgagttaccgattgagattgaactaggcatgaagtgctggtaccactccgtgttcgcttgccccatcctccgccagcagacgtcagattccaaccctcccatcaagctcatctgtggccatgttatctcccgagatgcactcaataagctcattaatggaggaaagctgaagtgtccctactgtcccatggagcagaacccggcagatgggaaacgcatcatattctgattcctacctggaaggaattttgttgaaaggggttttcacctgtgagccttggtctgtctcggtagggtggtcaacttcagtggactgtggttggtttcagagcgcctggctgaggagttccactgaggggagcactggagcagccctttggcagaggctgaggagggagatggaccagcccacgcctggcacctggctccatggcataaggaaagggagatgctggcctctgtgctcctgctgtcttttcctgtttctgtttgcgtttgacttagtagcaaccgacagagtggcaagggatttggtcttcagcagtagacatccttccacccctgccctcagccaagtctcttgctgccatgccaatgctatgtccacccttgcccctcggcccaagagtgtccagcggtggcccacctcttcctcccactacagcctcaacagtatgtaccatctcccactgtaaatagtcccagttagaacggaatgccgttgttttataactttgaacaaatgtatttactgcccttctcatt

SEQ ID NO: 1912 - DNA, 1212 bp, Artificial
  cDNA Sequence
ctcggccggcctcccgggccccagccttctccagaacccctgctacccacgactaagccccgaacaatctgcccttgggcttgttctcttcgcagttgtcggccctgggccgggagctggagtcccagactcataggtcccggcccagcccccgaagagccgcctcagccggggggagttgctcggactcaaacgtccagtcctcgtgcgaccgcgctgggtcggaagtgagcaggctgaggccaccatggagcagtgtgcgtgcgtggagagagagctggacaaggtcctgcagaagttcctgacctacgggcagcactgtgagcggagcctggaggagctgctgcactacgtgggccagctgcgggctgagctggccagcgcagccctccaggggacccctctctcagccaccctctctctggtgatgtcacagtgctgccggaagatcaaagatacggtgcagaaactggcttcggaccataaggacattcacagcagtgtatcccgagtgggcaaagccattgacaggaacttcgactctgagatctgtggtgttgtgtcagatgcggtgtgggacgcgcgggaacagcagcagcagatcctgcagatggccatcgtggaacacctgtatcagcagggcatgctcagcgtggccgaggagctgtgccaggaatcaacgctgaatgtggacttggatttcaagcagcctttcctagagttgaatcgaatcctggaagccctgcacgaacaagacctgggtcctgcgttggaatgggccgtctcccacaggcagcgcctgctggaactcaacagctccctggagttcaagctgcaccgactgcacttcatccgcctcttggcaggaggccccgcgaagcagctggaggccctcagctatgctcggcacttccagccctttgctcggctgcaccagcgggagatccaggtgatgatgggcagcctggtgtacctgcggctgggcttggagaagtcaccctactgccacctgctggacagcagccactgggcagagatctgtgagacctttacccgggacgcctgttccctgctggggctttctgtggagtccccccttagcgtcagctttgcctctggctgtgtggcgctgcctgtgttgatgaacatcaaggctgtgattgagcagcggcagtgcactggggtctggaatcacaaggacgagttaccggt

SEQ ID NO: 1913 - DNA, 1358 bp, Artificial
  cDNA Sequence
agggcacagggcttgactgtggtcttcatttcacccagatgtacttgacttgcctgcagccctgtctcaagagcctcacacaggcttttggggccctcctctcaggtgctggctctcaggtcctagcccccaccagctctacactaaactggcccctttcttcccagatgggccgtctcccacaggcagcgcctgctggaactcaacagctccctggagttcaagctgcaccgactgcacttcatccgcctcttggcaggaggccccgcgaagcagctggaggccctcagctatgctcggcacttccagccctttgctcggctgcaccagcgggagatccaggtgatgatgggcagcctggtgtacctgcggctgggcttggagaagtcaccctactgccacctgctggacagcagccactgggcagagatctgtgagacctttacccgggacgcctgttccctgctggggctttctgtggagtccccccttagcgtcagctttgcctctggctgtgtggcgctgcctgtgttgatgaacatcaaggctgtgattgagcagcggcagtgcactggggtctggaatcacaaggacgagttaccgattgagattgaactaggcatgaagtgctggtaccactccgtgttcgcttgccccatcctccgccagcagacgtcagattccaaccctcccatcaagctcatctgtggccatgttatctcccgagatgcactcaataagctcattaatggaggaaagctgaagtgtccctactgtcccatggagcagaacccggcagatgggaaacgcatcatattctgattcctacctggaaggaattttgttgaaaggggttttcacctgtgagccttggtctgtctcggtagggtggtcaacttcagtggactgtggttggtttcagagcgcctggctgaggagttccactgaggggagcactggagcagccctttggcagaggctgaggagggagatggaccagcccacgcctggcacctggctccatggcataaggaaagggagatgctggcctctgtgctcctgctgtcttttcctgtttctgtttgcgtttgacttagtagcaaccgacagagtggcaagggatttggtcttcagcagtagacatccttccacccctgccctcagccaagtctcttgctgccatgccaatgctatgtccacccttgcccctcggcccaagagtgtccagcggtggcccacctcttcctcccactacagcctcaacagtatgtaccatctcccactgtaaatagtcccagttagaacggaatgccgttgttttataactttgaacaaatgtatttactgcccttctcatt

SEQ ID NO: 1914 - DNA, 1770 bp, Artificial
  cDNA Sequence
gtcaggcggcggcaccgcgcgggacggagcttggctgttggtcggtgggttcccgtgcggcggcggccaaggaggaggagacacagttggagcagctccgtgggctgactggggcgaggcctcagcagcgcgagcttgagtgcggccgagcctgcggcgccttcccctgcgggtggggacgagcgggccccgcggcgtcatcggcggcgaggagccgccgcgcctcggcctagcatgtcggaagcgggcgaggagcagcccatggagacgacgggcgccaccgagaacggacatgaggccgtccccgaaggcgagtcgccggccggggctggcacgggcgccgcggcgggggctggaggcgcgaccgcggcgcccccgagcgggaatcagaacggcgccgagggcgaccagatcaacgccagcaagaacgaggaggacgcgggaaaaatgttcgttggtggcctgagctgggatactagcaaaaaagatttaaaagactattttactaaatttggagaggtcgttgactgtacaataaaaatggatcccaacactggacggtcaagagggtttgggtttatcctgttcaaagatgcagccagtgtggagaaggtcctagaccagaaggagcacaggctggatggccgtgtcattgaccctaaaaaggccatggctatgaagaaggacccggtgaagaaaatcttcgttgggggtctgaatcctgaagccactgaggaaaagatcagggagtactttggcgagtttggggagattgaggccattgaattgccaatggatccaaagttgaacaaaagacgaggttttgtgtttatcacctttaaagaagaagaacccgtgaagaaggttctggagaaaaagttccatactgtcagtggaagcaagtgtgagatcaaggtggcccagcccaaagaagtctatcagcagcagcagtatggctctgggggccgtggaaaccgcaaccgagggaaccgaggcagcggaggtggtggtggaggtggaggtcagagtcagagttggaatcagggctacggcaactactggaaccagggctacggctaccagcagggctacgggcctggctatggcggctacgactactcgccctatggctattacggctacggccccggctacgactacagtcagggtagtacaaactacggcaagagccagcgacgtggtggccatcagaataactacaagccatactgaggcggcagcaggagcgaccaactgatcgcacacatgctttgtttggatatggagtgaacacaattatgtaccaaatttaacttggcaaactttctattgcctgtcccatgtgcatcttatttaaaatttcccccatggaaatcactctcctgttgactatttccagagctctaggtgtttaggcagcgtgtggtgtctgagaggccatagcgccatcatgggctgatttttattaccaggtcccccagaagcaggtgggaggctctgcttcctgctgccgctctgcagcctggacctgtggaccctggttgtaaagagtaaattgtatcttaggaaaccagtgtcacctttttttcaccttttaattttatattatttgcgtcatacatttcctgtaacggaagtgttaattttactgtactttttggtaccttttgggaatctaatgtattgtaaggtattttacacgtgtcctgattttgccacaacctggatattgaagctatccaagcttttgaaataaaatttaaaaacccc

SEQ ID NO: 1915 - DNA, 1770 bp, Artificial; identical to SEQ ID NO: 1914
  cDNA Sequence

SEQ ID NO: 1916 - DNA, 1760 bp, Artificial
  cDNA Sequence
gtcaggcggcggcaccgcgcgggacggagcttggctgttggtcggtgggttcccgtgcggcggcggccaaggaggaggagacacagttggagcagctccgtgggctgactggggcgaggcctcagcagcgcgagcttgagtgcggccgagcctgcggcgccttcccctgcgggtggggacgagcgggccccgcggcgtcatcggcggcgaggagccgccgcgcctcggcctagcatgtcggaagcgggcgaggagcagcccatggagacgacgggcgccaccgagaacggacatgaggccgtccccgaaggcgagtcgccggccggggctggcacgggcgccgcggcgggggctggaggcgcgaccgcggcgcccccgagcgggaatcagaacggcgccgagggcgaccagatcaacgccagcaagaacgaggaggacgcgggaaaaatgttcgttggtggcctgagctgggatactagcaaaaaagatttaaaagactattttactaaatttggagaggtcgttgactgtacaataaaaatggatcccaacactggacggtcaagagggtttgggtttatcctgttcaaagatgcagccagtgtggagaaggtcctagaccagaaggagcacaggctggatggccgtgtcattgaccctaaaaaggccatggctatgaagaaggacccggtgaagaaaatcttcgttgggggtctgaatcctgaagccactgaggaaaagatcagggagtactttggcgaattgaggccattgaattgccaatggatccaaagttgaacaaaagacgaggttttgtgtttatcacctttaaagaagaagaacccgtgaagaaggttctggagaaaaagttccatactgtcagtggaagcaagtgtgagatcaaggtggcccagcccaaagaagtctatcagcagcagcagtatggctctgggggccgtggaaaccgcaaccgagggaaccgaggcagcggaggtggtggtggaggtggaggtcagagtcagagttggaatcagggctacggcaactactggaaccagggctacggctaccagcagggctacgggcctggctatggcggctacgactactcgccctatggctattacggctacggccccggctacgactacagtcagggtagtacaaactacggcaagagccagcgacgtggtggccatcagaataactacaagccatactgaggcggcagcaggagcgaccaactgatcgcacacatgctttgtttggatatggagtgaacacaattatgtaccaaatttaacttggcaaactttctattgcctgtcccatgtgcatcttatttaaaatttcccccatggaaatcactctcctgttgactatttccagagctctaggtgtttaggcagcgtgtggtgtctgagaggccatagcgccatcatgggctgatttttattaccaggtcccccagaagcaggtgggaggctctgcttcctgctgccgctctgcagcctggacctgtggaccctggttgtaaagagtaaattgtatcttaggaaaccagtgtcacctttttttcaccttttaattttatattatttgcgtcatacatttcctgtaacggaagtgttaattttactgtactttttggtaccttttgggaatctaatgtattgtaaggtattttacacgtgtcctgattttgccacaacctggatattgaagctatccaagcttttgaaataaaatttaaaaacccc

SEQ ID NO: 1917 - DNA, 1770 bp, Artificial; identical to SEQ ID NO: 1914
  cDNA Sequence

SEQ ID NO: 1918 - DNA, 1760 bp, Artificial; identical to SEQ ID NO: 1916
  cDNA Sequence

SEQ ID NO: 1919 - DNA, 1770 bp, Artificial; identical to SEQ ID NO: 1914
  cDNA Sequence

SEQ ID NO: 1920 - DNA, 1420 bp, Artificial
  cDNA Sequence
gtcaggcggcggcaccgcgcgggacggagcttggctgttggtcggtgggttcccgtgcggcggcggccaaggaggaggagacacagttggagcagctccgtgggctgactggggcgaggcctcagcagcgcgagcttgagtgcggccgagcctgcggcgccttcccctgcgggtggggacgagcgggccccgcggcgtcatcggcggcgaggagccgccgcgcctcggcctagcatgtcggaagcgggcgaggagcagcccatggagacgacgggcgccaccgagaacggacatgaggccgtccccgaaggcgagtcgccggccggggctggcacgggcgccgcggcgggggctggaggcgcgaccgcggcgcccccgagcgggaatcagaacggcgccgagggcgaccagatcaacgccagcaagaacgaggaggacgcgggaaaaatgttcgttggtggcctgagctgggatactagcaaaaaagatttaaaagactattttactaaatttggagaggtcgttgactgtacaataaaaatggatcccaacactggacggtcaagagggtttgggtttatcctgttcaaagatgcagccagtgtggagaaggtcctagaccagaaggagcacaggctggatggccgtgtcattgaccctaaaaaggccatggctatgaagaaggacccggtgaagaaaatcttcgttgggggtctgaatcctgaagccactgaggaaaagatcagggagtactttggcgaattgaggccattgaattgccaatggatccaaagttgaacaaaagacgaggttttgtgtttatcacctttaaagaagaagaacccgtgaagaaggttctggagaaaaagttccatactgtcagtggaagcaagtgtgagatcaaggtggcccagcccaaagaagtctatcagcagcagcagtatggctctgggggccgtggaaaccgcaaccgagggaaccgaggcagcggaggtggtggtggaggtggaggtcagggtagtacaaactacggcaagagccagcgacgtggtggccatcagaataactacaagccatactgaggcggcagcaggagcgaccaactgatcgcacacatgctttgtttggatatggagtgaacacaattatgtaccaaatttaacttggcaaactttctattgcctgtcccatgtgcatcttatttaaaatttcccccatggaaatcactctcctgttgactatttccagagctctaggtgtttaggcagcgtgtggtgtctgagaggccatagcgccatcatgggctgatttttattaccaggtcccccagaagcaggtgggaggctctgcttcctgctgccgctctgcagcctggacctgtggaccctggttgtaaagagtaaattgtatcttaggaaac

SEQ ID NO: 1921 - DNA, 1420 bp, Artificial; identical to SEQ ID NO: 1920
  cDNA Sequence

SEQ ID NO: 1922 - DNA, 1264 bp, Artificial
  cDNA Sequence
gtcaggcggcggcaccgcgcgggacggagcttggctgttggtcggtgggttcccgtgcggcggcggccaaggaggaggagacacagttggagcagctccgtgggctgactggggcgaggcctcagcagcgcgagcttgagtgcggccgagcctgcggcgccttcccctgcgggtggggacgagcgggccccgcggcgtcatcggcggcgaggagccgccgcgcctcggcctagcatgtcggaagcgggcgaggagcagcccatggagacgacgggcgccaccgagaacggacatgaggccgtccccgaaggcgagtcgccggccggggctggcacgggcgccgcggcgggggctggaggcgcgaccgcggcgcccccgagcgggaatcagaacggcgccgagggcgaccagatcaacgccagcaagaacgaggaggacgcgggaaaaatgttcgttggtggcctgagctgggatactagcaaaaaagatttaaaagactattttactaaatttggagaggtcgttgactgtacaataaaaatggatcccaacactggacggtcaagagggtttgggtttatcctgttcaaagatgcagccagtgtggagaaggtcctagaccagaaggagcacaggctggatggccgtgtcattgaccctaaaaaggccatggctatgaagaaggacccggtgaagaaaatcttcgttgggggtctgaatcctgaagccactgaggaaaagatcagggagtactttggcgagtttggggagattgaggccattgaattgccaatggatccaaagttgaacaaaagacgaggttttgtgtttatcacctttaaagaagaagaacccgtgaagaaggttctggagaaaaagttccatactgtcagtggaagcaagtgtgagatcaaggtggcccagcccaaagaagtctatcagcagcagcagtatggctctgggggccgtggaaaccgcaaccgagggaaccgaggcagcggaggtggtggtggaggtggaggtcagggtagtacaaactacggcaagagccagcgacgtggtggccatcagaataactacaagccatactgaggcggcagcaggagcgaccaactgatcgcacacatgctttgtttggatatggagtgaacacaattatgtaccaaatttaacttggcaaactttctattgcctgtcccatgtgcatcttatttaaaatttcccccatggaaatcactctcctgttgactatttccagagctct

SEQ ID NO: 1923 - DNA, 1264 bp, Artificial; identical to SEQ ID NO: 1922
  cDNA Sequence

SEQ ID NO: 1924 - DNA, 614 bp, Artificial
  cDNA Sequence
gtcaggcggcggcaccgcgcgggacggagcttggctgttggtcggtgggttcccgtgcggcggcggccaaggaggaggagacacagttggagcagctccgtgggctgactggggcgaggcctcagcagcgcgagcttgagtgcggccgagcctgcggcgccttcccctgcgggtggggacgagcgggccccgcggcgtcatcggcggcgaggagccgccgcgcctcggcctagcatgtcggaagcgggcgaggagcagcccatggagacgacgggcgccaccgagaacggacatgaggccgtccccgaaggcgagtcgccggccggggctggcacgggcgccgcggcgggggctggaggcgcgaccgcggcgcccccgagcgggaatcagaacggcgccgagggcgaccagatcaacgccagcaagaacgaggaggacgcgggaaaaatgttcgttggtggcctgagctgggatactagcaaaaaagatttaaaagactattttactaaatttggagaggtcgttgactgtacaataaaaatggatcccaacactggacggtcaagagggtttgggtttatcctgttcaaagatgcagccagtgtggagaaggt

SEQ ID NO: 1925 - DNA, 1328 bp, Artificial
  cDNA Sequence
gaaaaatgttcgttggtggcctgagctgggatactagcaaaaaagatttaaaagactattttactaaatttggagaggtcgttgactgtacaataaaaatggatcccaacactggacggtcaagagggtttgggtttatcctgttcaaagatgcagccagtgtggagaaggtcctagaccagaaggagcacaggctggatggccgtgtcattgaccctaaaaaggccatggctatgaagaaggacccggtgaagaaaatcttcgttgggggtctgaatcctgaagccactgaggaaaagatcagggagtactttggcgagtttggggagattgaggccattgaattgccaatggatccaaagttgaacaaaagacgaggttttgtgtttatcacctttaaagaagaagaacccgtgaagaaggttctggagaaaaagttccatactgtcagtggaagcaagtgtgagatcaaggtggcccagcccaaagaagtctatcagcagcagcagtatggctctgggggccgtggaaaccgcaaccgagggaaccgaggcagcggaggtggtggtggaggtggaggtcagagtcagagttggaatcagggctacggcaactactggaaccagggctacggctaccagcagggctacgggcctggctatggcggctacgactactcgccctatggctattacggctacggccccggctacgactacagtcagggtagtacaaactacggcaagagccagcgacgtggtggccatcagaataactacaagccatactgaggcggcagcaggagcgaccaactgatcgcacacatgctttgtttggatatggagtgaacacaattatgtaccaaatttaacttggcaaactttctattgcctgtcccatgtgcatcttatttaaaatttcccccatggaaatcactctcctgttgactatttccagagctctaggtgtttaggcagcgtgtggtgtctgagaggccatagcgccatcatgggctgatttttattaccaggtcccccagaagcaggtgggaggctctgcttcctgctgccgctctgcagcctggacctgtggaccctggttgtaaagagtaaattgtatcttaggaaaccagtgtcacctttttttcaccttttaattttatattatttgcgtcatacatttcctgtaacggaagtgttaattttactgtactttttggtaccttttgggaatctaatgtattgtaaggtattttacacgtgtcctgattttgccacaacctggatattgaagctatccaagcttttgaaataaaatttaaaaacccc

SEQ ID NO: 1926 - DNA, 1166 bp, Artificial
  cDNA Sequence
tggaacaggtcctagaccagaaggagcacaggctggatggccgtgtcattgaccctaaaaaggccatggctatgaagaaggacccggtgaagaaaatcttcgttgggggtctgaatcctgaagccactgaggaaaagatcagggagtactttggcgagtttggggagattgaggccattgaattgccaatggatccaaagttgaacaaaagacgaggttttgtgtttatcacctttaaagaagaagaacccgtgaagaaggttctggagaaaaagttccatactgtcagtggaagcaagtgtgagatcaaggtggcccagcccaaagaagtctatcagcagcagcagtatggctctgggggccgtggaaaccgcaaccgagggaaccgaggcagcggaggtggtggtggaggtggaggtcagagtcagagttggaatcagggctacggcaactactggaaccagggctacggctaccagcagggctacgggcctggctatggcggctacgactactcgccctatggctattacggctacggccccggctacgactacagtcagggtagtacaaactacggcaagagccagcgacgtggtggccatcagaataactacaagccatactgaggcggcagcaggagcgaccaactgatcgcacacatgctttgtttggatatggagtgaacacaattatgtaccaaatttaacttggcaaactttctattgcctgtcccatgtgcatcttatttaaaatttcccccatggaaatcactctcctgttgactatttccagagctctaggtgtttaggcagcgtgtggtgtctgagaggccatagcgccatcatgggctgatttttattaccaggtcccccagaagcaggtgggaggctctgcttcctgctgccgctctgcagcctggacctgtggaccctggttgtaaagagtaaattgtatcttaggaaaccagtgtcacctttttttcaccttttaattttatattatttgcgtcatacatttcctgtaacggaagtgttaattttactgtactttttggtaccttttgggaatctaatgtattgtaaggtattttacacgtgtcctgattttgccacaacctggatattgaagctatccaagcttttgaaataaaatttaaaaacccc

SEQ ID NO: 1927 - DNA, 751 bp, Artificial
  cDNA Sequence
aggtcagagtcagagttggaatcagggctacggcaactactggaaccagggctacggctaccagcagggctacgggcctggctatggcggctacgactactcgccctatggctattacggctacggccccggctacgactacagtcagggtagtacaaactacggcaagagccagcgacgtggtggccatcagaataactacaagccatactgaggcggcagcaggagcgaccaactgatcgcacacatgctttgtttggatatggagtgaacacaattatgtaccaaatttaacttggcaaactttctattgcctgtcccatgtgcatcttatttaaaatttcccccatggaaatcactctcctgttgactatttccagagctctaggtgtttaggcagcgtgtggtgtctgagaggccatagcgccatcatgggctgatttttattaccaggtcccccagaagcaggtgggaggctctgcttcctgctgccgctctgcagcctggacctgtggaccctggttgtaaagagtaaattgtatcttaggaaaccagtgtcacctttttttcaccttttaattttatattatttgcgtcatacatttcctgtaacggaagtgttaattttactgtactttttggtaccttttgggaatctaatgtattgtaaggtattttacacgtgtcctgattttgccacaacctggatattgaagctatccaagcttttgaaataaaatttaaaaacccc

SEQ ID NO: 1928 - DNA, 666 bp, Artificial
  cDNA Sequence
gatcttcacttttaacaaaccgaggtgcagaatggcctgacagcagctatctatccaacagtcatgtcccaggccggaatcctcccaaccagggagggaccacttcctacctgacatcaaggacagggccagcgggggtggtctcctggggttgccgaccctgagaaggccaaagccccggggctgctcaggcaggaaagtcacgcttcgcagctccactgactgtccccgcggggtggcacagcactcatgcccagcaagagacacggagacgggcctctgagtgtcaggacgctcacgatgaatgaggtgcagctgcaactggctctggaggtaagaaaacagcagctgcctacaagccaggaagagaggcctcgccggaaatcaactctaatgacaccttggtcttggatgtccagcctccagaacttcgagaaaataactttctgttgttgaaaccacccggtctgtgggattttgttgtggcagccctagcagactaaggcacaggccctaagctagatactttcatcctggcttctctactcagctctcgggcggccctgtgaggggggcatcgtcctcgctgtcctggtctcaccaagaaggtgcaagacttcaagaagctgcaggcggttctgtgactggatcaagtttgcagagcta

SEQ ID NO: 1929 - DNA, 621 bp, Artificial
  cDNA Sequence
gtcctgcagggcgctgacggcctcaagggggagaagggggagtcggcgtctgacagcctacaggagagcctggctcagctcatagtggagccagggccccctggcccccctggccccccaggcccgatgggcctccagggaatccagggtcccaagggcttggatggagcaaagggagagaagggtgcgtcgggtgagagaggccccagcggcctgcctgggccagttggcccaccgggccttattgggctgccaggaaccaaaggagagaagggcagacccggggagccaggactagatggtttccctggaccccgaggagagaaaggtgatcggagcgagcgtggagagaagggagaacgaggggtccccggccggaaaggagtgaagggccagaagggcgagccgggaccaccaggcctggaccagccgtgtcccgtgggccccgacgggctgcctgtgcctggctgctggcataagtgacccacaggcccagctcacacctgtacagatccgtgtggacatttttaatttttgtaaaaacaaaacagtaatatattgatcttttttcatggaatgcgctacctgtggccttttaacattcaagagtatgcccaccca

SEQ ID NO: 1930 - DNA, 1663 bp, Artificial
  cDNA Sequence
cttcaccctttcggtcttcagacatggctgtccactccttgcctgtccccacagctcttcctgcagactcttttttcccgaggatcctgttaagattgtccgggcccaagggcagtacatgtacgatgaacagggggcagaatacatcgattgcatcagcaatgtggcgcacgttgggcactgccaccctctcgtggtccaagcagcacatgagcagaaccaggtgctcaacaccaacagccggtacctgcatgacaacatcgtggactatgcgcagaggctgtcagagaccctgccggagcagctctgtgtgttctatttcctgaattctgggtcagaagccaatgacctggccctgaggctggctcgccactacacgggacaccaggacgtggtggtattagatcatgcgtatcacggccacctgagctccctgattgacatcagtccctacaagttccgcaacctggatggccagaaggagtgggtccacgtggcacctctcccagacacctaccggggcccctaccgggaggaccaccccaacccagctatggcctatgccaacgaggtgaaacgtgtggtcagcagtgcacaggagaagggcaggaagattgcagccttcttcgctgagtctctgcccagtgtgggagggcagatcattccccctgctggctacttctcccaagtggcagagcacatccgcaaggccggaggggtctttgttgcagatgagatccaggttggctttggccgggtaggcaagcacttctgggccttccagctccagggaaaagacttcgtccctgacatcgtcaccatgggcaagtccattggcaacggccaccctgttgcctgcgtggccgcaacccagcctgtggcgagggcatttgaagccaccggcgttgagtacttcaacacgtttgggggcagcccagtgtcctgcgctgtggggctggccgtcctgaatgtcttggagaaggagcagctccaggatcatgccaccagtgtaggcagcttcctgatgcagctcctcgggcagcaaaaaatcaaacatcccatcgtcggggatgtcaggggtgttgggctcttcattggtgtggatctgatcaaagatgaggccacaaggacaccagcaactgaagaggctgcctacttggtatcaagacatggaagagaaggtgagaagttgtgaaacgctgaggctccagccctaagccagccctgctctgcctaagtgtactccagaagaaactcatctcatccaaatacacgctattgagaaggcgagcctgacctccctcttacagataaagtcagctttcagaggctcagggtgggggggcctgcccgaggccataatgctacccaccccctcctcctaaccactggtctgttggaataacccagatgtctgcatcccctcaagtcagtcaatttcctttctgtccactgggggtggaatggggtagggtgggatactttaaagtgctcctgcttaaataaattagaccagaccagtgtatttctaaagaaaatcctgacatgcacacccattaaaaatagtacattttacagtgtcccagtcatacttttaattggcaaattaaaataatgcaatctgatatattctatcctactaaattaaaaatactgaatataa

SEQ ID NO: 1931 - DNA, 1708 bp, Artificial
  cDNA Sequence
cttcaccctttcggtcttcagacatggctgtccactccttgcctgtccccacagctcttcctgcagactcttttttcccgaggatcctgttaagattgtccgggcccaagggcagtacatgtacgatgaacagggggcagaatacatcgattgcatcagcaatgtggcgcacgttgggcactgccaccctctcgtggtccaagcagcacatgagcagaaccaggtgctcaacaccaacagccggtacctgcatgacaacatcgtggactatgcgcagaggctgtcagagaccctgccggagcagctctgtgtgttctatttcctgaattctgggtcagaagccaatgacctggccctgaggctggctcgccactacacgggacaccaggacgtggtggtattagatcatgcgtatcacggccacctgagctccctgattgacatcagtccctacaagttccgcaacctggatggccagaaggagtgggtccacgtggcacctctcccagacacctaccggggcccctaccgggaggaccaccccaacccagctatggcctatgccaacgaggtgaaacgtgtggtcagcagtgcacaggagaagggcaggaagattgcagccttcttcgctgagtctctgcccagtgtgggagggcagatcattccccctgctggctacttctcccaagtggcagagcacatccgcaaggccggaggggtctttgttgcagatgagatccaggttggctttggccgggtaggcaagcacttctgggccttccagctccagggaaaagacttcgtccctgacatcgtcaccatgggcaagtccattggcaacggccaccctgttgcctgcgtggccgcaacccagcctgtggcgagggcatttgaagccaccggcgttgagtacttcaacacgtttgggggcagcccagtgtcctgcgctgtggggctggccgtcctgaatgtcttggagaaggagcagctccaggatcatgccaccagtgtaggcagcttcctgatgcagctcctcgggcagcaaaaaatcaaacatcccatcgtcggggatgtcaggggtgttgggctcttcattggtgtggatctgatcaaagatgaggccacaaggacaccagcaactgaagaggctgcctacttggtatcaaggctgaaggagaactacgttttgctgagcactgatggccctgggaggaacatcctgaagtttaagcccccaatgtgcttcagcctggacaatgcacggcaggtggtggcaaagctggatgccattctgactgacatggaagagaaggtgagaagttgtgaaacgctgaggctccagccctaagccagccctgctctgcctaagtgtactccagaagaaactcatctcatccaaatacacgctattgagaaggcgagcctgacctccctcttacagataaagtcagctttcagaggctcagggtgggggggcctgcccgaggccataatgctacccaccccctcctcctaaccactggtctgttggaataacccagatgtctgcatcccctcaagtcagtcaatttcctttctgtccactgggggtggaatggggtagggtgggatactttaaagtgctcctgcttaaataaattagaccagaccagtgtatttctaaagaaaatcctgacatgcacacccattaaaaatagtacattttaca

SEQ ID NO: 1932 - DNA, 1801 bp, Artificial
  cDNA Sequence
cttcaccctttcggtcttcagacatggctgtccactccttgcctgtccccacagctcttcctgcagactcttttttcccgaggatcctgttaagattgtccgggcccaagggcagtacatgtacgatgaacagggggcagaatacatcgattgcatcagcaatgtggcgcacgttgggcactgccaccctctcgtggtccaagcagcacatgagcagaaccaggtgctcaacaccaacagccggtacctgcatgacaacatcgtggactatgcgcagaggctgtcagagaccctgccggagcagctctgtgtgttctatttcctgaattctgggtcagaagccaatgacctggccctgaggctggctcgccactacacgggacaccaggacgtggtggtattagatcatgcgtatcacggccacctgagctccctgattgacatcagtccctacaagttccgcaacctggatggccagaaggagtgggtccacgtggcacctctcccagacacctaccggggcccctaccgggaggaccaccccaacccagctatggcctatgccaacgaggtgaaacgtgtggtcagcagtgcacaggagaagggcaggaagattgcagccttcttcgctgagtctctgcccagtgtgggagggcagatcattccccctgctggctacttctcccaagtggcagagcacatccgcaaggccggaggggtctttgttgcagatgagatccaggttggctttggccgggtaggcaagcacttctgggccttccagctccagggaaaagacttcgtccctgacatcgtcaccatgggcaagtccattggcaacggccaccctgttgcctgcgtggccgcaacccagcctgtggcgagggcatttgaagccaccggcgttgagtacttcaacacgtttgggggcagcccagtgtcctgcgctgtggggctggccgtcctgaatgtcttggagaaggagcagctccaggatcatgccaccagtgtaggcagcttcctgatgcagctcctcgggcagcaaaaaatcaaacatcccatcgtcggggatgtcaggggtgttgggctcttcattggtgtggatctgatcaaagatgaggccacaaggacaccagcaactgaagaggctgcctacttggtatcaaggctgaaggagaactacgttttgctgagcactgatggccctgggaggaacatcctgaagtttaagcccccaatgtgcttcagcctggacaatgcacggcaggtggtggcaaagctggatgccattctgactgacatggaagagaaggtgagaagttgtgaaacgctgaggctccagccctaagccagccctgctctgcctaagtgtactccaggtgagtgggccttgcttcttactcttgaagatgcacagcgggttccttaccatcagcagcaagcagcctcggcaagctgagcctttttttaagacttttttttgttctgactgatgctccttcccaaagaagaaactcatctcatccaaatacacgctattgagaaggcgagcctgacctccctcttacagataaagtcagctttcagaggctcagggtgggggggcctgcccgaggccataatgctacccaccccctcctcctaaccactggtctgttggaataacccagatgtctgcatcccctcaagtcagtcaatttcctttctgtccactgggggtggaatggggtagggtgggatactttaaagtgctcctgcttaaataaattagaccagaccagtgtatttctaaagaaaatcc

SEQ ID NO: 1933 - DNA, 874 bp, Artificial
  cDNA Sequence
aagcagcacatgagcagaaccaggtgctcaacaccaacagccggtacctgcatgacaacatcgtggactatgcgcagaggctgtcagagaccctgccggagcagctctgtgtgttctatttcctgaattctggtttgggggcagcccagtgtcctgcgctgtggggctggccgtcctgaatgtcttggagaaggagcagctccaggatcatgccaccagtgtaggcagcttcctgatgcagctcctcgggcagcaaaaaatcaaacatcccatcgtcggggatgtcaggggtgttgggctcttcattggtgtggatctgatcaaagatgaggccacaaggacaccagcaactgaagaggctgcctacttggtatcaagacatggaagagaaggtgagaagttgtgaaacgctgaggctccagccctaagccagccctgctctgcctaagtgtactccagaagaaactcatctcatccaaatacacgctattgagaaggcgagcctgacctccctcttacagataaagtcagctttcagaggctcagggtgggggggcctgcccgaggccataatgctacccaccccctcctcctaaccactggtctgttggaataacccagatgtctgcatcccctcaagtcagtcaatttcctttctgtccactgggggtggaatggggtagggtgggatactttaaagtgctcctgcttaaataaattagaccagaccagtgtatttctaaagaaaatcctgacatgcacacccattaaaaatagtacattttacagtgtcccagtcatacttttaattggcaaattaaaataatgcaatctgatatattctatcctactaaattaaaaatactgaatataa

SEQ ID NO: 1934 - DNA, 1015 bp, Artificial
  cDNA Sequence
caggcacatccgcaaggccggaggggtctttgttgcagatgagatccaggttggctttggccgggtaggcaagcacttctgggccttccagctccagggaaaagacttcgtccctgacatcgtcaccatgggcaagtccattggcaacggccaccctgttgcctgcgtggccgcaacccagcctgtggcgagggcatttgaagccaccggcgttgagtacttcaacacgtttgggggcagcccagtgtcctgcgctgtggggctggccgtcctgaatgtcttggagaaggagcagctccaggatcatgccaccagtgtaggcagcttcctgatgcagctcctcgggcagcaaaaaatcaaacatcccatcgtcggggatgtcaggggtgttgggctcttcattggtgtggatctgatcaaagatgaggccacaaggacaccagcaactgaagaggctgcctacttggtatcaaggctgaaggagaactacgttttgctgagcactgatggccctgggaggaacatcctgaagtttaagcccccaatgtgcttcagcctggacaatgcacggcaggtggtggcaaagctggatgccattctgactgacatggaagagaaggtgagaagttgtgaaacgctgaggctccagccctaagccagccctgctctgcctaagtgtactccagaagaaactcatctcatccaaatacacgctattgagaaggcgagcctgacctccctcttacagataaagtcagctttcagaggctcagggtgggggggcctgcccgaggccataatgctacccaccccctcctcctaaccactggtctgttggaataacccagatgtctgcatcccctcaagtcagtcaatttcctttctgtccactgggggtggaatggggtagggtgggatactttaaagtgctcctgcttaaataaattagaccagaccagtgtatttctaaagaaaatcctgacatgcacacccattaaaaatagtacattttaca

SEQ ID NO: 1935 - DNA, 864 bp, Artificial
  cDNA Sequence
gcgtcaacgattgggctgagtcggagacttcctttcctgattggccgtgttgtacggcggcttctcgcgcagctgatgacctggaagtgatgcctaaagctgtggaccgcgtgggctcgcctccctgggactaggtttcagcggccgctgcgatgaccaaaataaaggcagatcccgacgggcccgaggctcaggcggaggcgtgttccggggagcgcacctaccaggagctgctggtcaaccagaaccccatcgcgcagcccctggcttctcgccgcctcacgcggaagctctacaaatgcatcaagaaagcggtgaagcagaagcagattcggcgcggggtgaaagaggttcagaaatttgtcaacaaaggagaaaaagggatcatggttttggcaggagacacactgcccattgaggtatactgccatctcccagtcatgtgtgaggaccgaaatttgccctatgtctatatcccctctaagacggacctgggtgcagccgcaggctccaagcgccccacctgtgtgataatggtcaagccccatgaggagtaccaggaggcttacgatgagtgcctggaggaggtgcagtccctgcccctacccctatgaggggctccggtagcacctgggcacctgccgctggaagctattgggctggcagcaggacgactggctgtcctcctgcccacccacactgacggcatcttcccagttccccaaggcacgccttcttcccaggcagctctaacagccctttcatgaaggtaatgctagtcttctgtccatcagtgccatttcctgtagaactaaaggctgttccaagaatgtggggtggggaaagtaaatgctaagactaaaa

SEQ ID NO: 1936 - DNA, 521 bp, Artificial
  cDNA Sequence
gatgatataggtcttgcctttcattttaactgccattctggcaactgaacgttggcagtaaacgcagcttagttgtctcagaggactcacaatgggatgtgtttatagttgttgccttgaagtgtgttgtggcgaggatgaaatagtgtatcctaggatgccaggggaatccaccgtctgccaccgcgagcgtgagaagccaatcacctatcactggtatcactggcatcccggccatatataccctagaattgcatcaatggaagattacgatgaggacctggtgcaggaagcttcatctgaagatgtcctgggcgttcatatggtggacaaagacacagagagagacattgagatgaaacggcaactacggcgactacgggagctccacctatacagcacatggaagaagtaccaagaggcgatgaagacatccttgggagttccacaatgtgagcgtgacgaaggctccttgggcaagccattgtgtccacccgagatactctcggagacgttgccag

SEQ ID NO: 1937 - DNA, 831 bp, Artificial
  cDNA Sequence
ccaaagcttccagcttgccacctggaagaaggtcactttcttttgagcaaaggagataacgggaggtaccctgccaaagttcactgagaggcgggggtgacatgggccacggttgctctgggagggttgtggcactcggggctgggtggctctccctaagcttgctctgacaaaagagttttgagttggtcttttggctgagcctgcccaggaaggcaggctcctgcaggagtcttggagggtcggatgcggcgccggatgaggatgaggcgtggcggaagatgcgtttggctctgcagacactgcatcgggcagcaggggactctgggaggctggtgcagccagaaggcatggctcttgacagccttctagtagaatctctggaattgtgcatggcagaagaggaaagaaactaacgggtattgagcacctactttgtgccaggcccaggccaggtcccccccgcctccagccagcctgtgcagacttgctgcctgctgtgtcaccgggaacgcaaaggctgggaagaaggcccttctcaaaatggactggtgttgcagggtgagaagctgccccctgacttcatgccaaagctcgtcaagaatctcctaggcgagatgcctctgtgggtctgccagagttgccgaaagagcatggaggaagatgaaaggcagacaggtcgagaacatgcagtggcgatctccttgtcacacacatcctgcaaatcacagtcttgtggagatgactctcattcgtcctcgtcttcctcctcatcatcctcatcctcgtcctcctcttcctgccctgggaactcgggagactgggatccta

SEQ ID NO: 1938 - DNA, 936 bp, Artificial
  cDNA Sequence
ctcccacccccgagctctcagccactccctagcactcacagggatcccgggtgcaaggggcacaagtttgcacacagtggcctggcttgccagctgccccagccctgcgaggcagatgaggggctgggtgaggaagaggatagcagctctgagcgaagctcctgcacctcatcctccacccaccagagagatgggaagttctgtgactgctgctactgtgagttcttcggccacaatgcgccacccgctgccccgacgagtcggaactataccgagatccgggagaagctccgctcgaggctgaccaggcggaaagaggagctgcccatgaaggggggcaccctgggcgggatccctggggagcccgccgtggaccaccgagatgtggatgagctgctggaattcatcaacagcacggagcccaaagtccccaacagcgccagggccgccaagcgggcccggcacaagctgaaaaagaaggaaaaggagaaggcccagttggcagcagaagctctaaagcaggcaaatcgtgtttctggaagccgggagccaaggcctgccagggagaggctcttggagtggcccgaccgggaactggatcgggtcaacagcttcctgagcagccgtctgcaggagatcaaaaacactgtcaaagactccatccgtgccagcttcagtgtgtgtgagctcagcatggacagcaatggcttctctaaggagggggctgctgagcctgagcctcagagtctacccccctcaaacctcagtggctcctcagagcagcagcctgacatcaaccttgacctgtcccctttgactttgggctcccctcagaaccacacgttacaagctccaggcgagccagccccaccatgggcagaaatgagaggcccccacccaccatggacagaggtgagggggccccctcccggtatc

SEQ ID NO: 1939 - DNA, 683 bp, Artificial
  cDNA Sequence
tcaggagcaggagtctgtgcagccctcaggcccagcaaggccacagagcttgccccagggcaagggccgcagccgccggagccgcaacaagcaggagaagccagcctcctccttggacgatgtgttcctgcccaaggacatggacggggtggagatggatgagactgaccgagaggtggagtactttaagaggttctgtttggattctgcaaagcagactcgtcagaaagttgctgtgaactggaccaacttcagcctcaagaaaaccactcctagcacagctcagtgaggccctgcccaggctgagctgcttcagggcgtcctgaggccctgactgccagctgaaggcgtataatttttccctccgtgtgccccacctacccgtccaagaccctctgtgctccccaccatcctggaccaaccaaaagctgaacggatgccacactgtgctggggccccttgacctcagcagagccgcttcctggtgctacgcagcctccacactcagagcccgtggactgggctggcctaagggccagggctgatggtactgctggcccaacactgctctctttgtgtttggtttttttgtttttgtttttattttgtttttttccaattctttacttttgatactgtgaagatctttcgtgccgaaagataaagcaacatttggacacaga

SEQ ID NO: 1940 - DNA, 806 bp, Artificial
  cDNA Sequence
cccatgtggactggatgcccagcgtgagtgtataccgtgagggcctttgagctctcggacagcgtggagtggtcaagggaggcctccaggaggaagaggtggccaaccgccccaggcagcacagtggtcttgaagcggcggccctgctcctggccgtgaccatggaccctctggagacccctatcaaggatggcatcctctaccagcagcatgtcaagtttggcaagaagtgctggcggaaggtgtgggctctgctgtatgcaggaggcccatcaggcgtggcacggctggagagctgggaggtccgggatggtggcctgggagcagcgggtgacaggtcggcagggcctggccggcgaggggagcgacgggtcatccgcctggctgactgtgtgtccgtgctgccggctgacggcgagagctgcccccgggacaccggtgccttcctgctcaccaccaccgagcgaagccatctactggctgctcagcaccgccaggcctggatgggccccatctgccagctggccttcccggggacaggggaggcctcctcaggatccacagatgcccagtctcccaagaggggcctggtccccatggaggaaaactccatctactcctcctggcaggaagtgggcgagtttcccgtggtggtgcagaggactgaggccgccacccgctgccagctgaaggggccggccctgctggtgctgggcccagacgccatccagctgagggaggccaagggcacccaggccctctacagctggccctaccacttcctgcgcaagttcggctccgacaag

SEQ ID NO: 1941 - DNA, 833 bp, Artificial
  cDNA Sequence
cggggagccagactgcgatcagacgcgcgtgcccagctgaaccaggtcttgaagcggcggccctgctcctggccgtgaccatggaccctctggagacccctatcaaggatggcatcctctaccagcagcatgtcaagtttggcaagaagtgctggcggaaggtgtgggctctgctgtatgcaggaggcccatcaggcgtggcacggctggagagctgggaggtccgggatggtggcctgggagcagcgggtgacaggtcggcagggcctggccggcgaggggagcgacgggtcatccgcctggctgactgtgtgtccgtgctgccggctgacggcgagagctgcccccgggacaccggtgccttcctgctcaccaccaccgagcgaagccatctactggctgctcagcaccgccaggcctggatgggccccatctgccagctggccttcccggtgagggacaggggaggcctcctcaggatccacagatgcccagtctcccaagaggggcctggtccccatggaggaaaactccatctactcctcctggcaggaagtgggcgagtttcccgtggtggtgcagaggactgaggccgccacccgctgccagctgaaggggccggccctgctggtgctgggcccagacgccatccagctgagggaggccaagggcacccaggccctctacagctggccctaccacttcctgcgcaagttcggctccgacaaggtgaggtgcaggggtgggaaagggtgaggggctgacaccctggaccctcctgctaatccccacccgtgtgccctgtgcccagggcgtgttctcctttgaggccg

SEQ ID NO: 1942 - DNA, 802 bp, Artificial
  cDNA Sequence
tgcgatcagacgcgcgtgcccagctgaaccaggtgcgtgagaaggctgccttcaggtggccgggggctccctccagctgtctctagacggagggacgggaagtggccagaaggggaagtgtgaggagttcccgtccagcctgtcatcagtctccccaggtcttgaagcggcggccctgctcctggccgtgaccatggaccctctggagacccctatcaaggatggcatcctctaccagcagcatgtcaagtttggcaagaagtgctggcggaaggtgtgggctctgctgtatgcaggaggcccatcaggcgtggcacggctggagagctgggaggtccgggatggtggcctgggagcagcgggtgacaggtcggcagggcctggccggcgaggggagcgacgggtcatccgcctggctgactgtgtgtccgtgctgccggctgacggcgagagctgcccccgggacaccggtgccttcctgctcaccaccaccgagcgaagccatctactggctgctcagcaccgccaggcctggatgggccccatctgccagctggccttcccggtgagggacaggggaggcctcctcaggatccacagatgcccagtctcccaagaggggcctggtccccatggaggaaaactccatctactcctcctggcaggaagtgggcgagtttcccgtggtggtgcagaggactgaggccgccacccgctgccagctgaaggggccggccctgctggtgctgggcccagacgccatccagctgagggaggccaagggcacccaggccctctacag

SEQ ID NO: 1943 - DNA, 652 bp, Artificial
  cDNA Sequence
ggcggccgatcccaacgaggctccctggagcccgacgcagagcagcgccctggccgggccaagcaggagccggcatcatggattccttcaaagtagtgctggaggggccagcaccttggggcttccggctgcaagggggcaaggacttcaatgtgcccctctccatttcccggctcactcctgggggcaaagcggcgcaggccggagtggccgtgggtgactgggtgctgagcatcgatggcgagaatgcgggtagcctcacacacatcgaagctcagaacaagatccgggcctgcggggagcgcctcagcctgggcctcagcagggcccagccggttcagagcaaaccgcagaaggcctccgcccccgccgcggaccctccgcggtacacctttgcacccagcgtctccctcaacaagacggcccggccctttggggcgcccccgcccgctgacagcgccccgcagcagaatggacagccgctccgaccgctggtcccagatgccagcaagcagcggctgatggagaacacagaggactggcggccgcggccggggacaggccagtcgcgttccttccgcatccttgcccacctcacaggcaccgagttcatgcaagacccggatgaggagcacctgaagaaatcaaggta

SEQ ID NO: 1944 - DNA, 1520 bp, Artificial
  cDNA Sequence
gccgatcccaacgaggctccctggagcccgacgcagagcagcgccctggccgggccaagcaggagccggcatcatggattccttcaaagtagtgctggaggggccagcaccttggggcttccggctgcaagggggcaaggacttcaatgtgcccctctccatttcccggctcactcctgggggcaaagcggcgcaggccggagtggccgtgggtgactgggtgctgagcatcgatggcgagaatgcgggtagcctcacacacatcgaagctcagaacaagatccgggcctgcggggagcgcctcagcctgggcctcagcagggcccagccggttcagagcaaaccgcagaaggcctccgcccccgccgcggaccctccgcggtacacctttgcacccagcgtctccctcaacaagacggcccggccctttggggcgcccccgcccgctgacagcgccccgcagcagaatggacagccgctccgaccgctggtcccagatgccagcaagcagcggctgatggagaacacagaggactggcggccgcggccggggacaggccagtcgcgttccttccgcatccttgcccacctcacaggcaccgagttcatgcaagacccggatgaggagcacctgaagaaatcaagccaggtgcccaggacagaagccccagccccagcctcatctacaccccaggagccctggcctggccctaccgcccccagccctaccagccgcccgccctgggctgtggaccctgcgtttgccgagcgctatgccccggacaaaacgagcacagtgctgacccggcacagccagccggccacgcccacgccgctgcagagccgcacctccattgtgcaggcagctgccggaggggtgccaggagggggcagcaacaacggcaagactcccgtgtgtcaccagtgccacaaggtcatccggggccgctacctggtggcgctgggccacgcgtaccacccggaggagtttgtgtgtagccagtgtgggaaggtcctggaagagggtggcttctttgaggagaagggcgccatcttctgcccaccatgctatgacgtgcgctatgcacccagctgtgccaagtgcaagaagaagattacaggcgagatcatgcacgccctgaagatgacctggcacgtgcactgctttacctgtgctgcctgcaagacgcccatccggaacagggccttctacatggaggagggcgtgccctattgcgagcgagactatgagaagatgtttggcacgaaatgccatggctgtgacttcaagatcgacgctggggaccgcttcctggaggccctgggcttcagctggcatgacacctgcttcgtctgtgcgatatgtcagatcaacctggaaggaaagaccttctactccaagaaggacaggcctctctgcaagagccatgccttctctcatgtgtgagccccttctgcccacagctgccgcggtggcccctagcctgaggggcctggagtcgtggccctgcatttctggg

SEQ ID NO: 1945 - DNA, 558 bp, Artificial
  cDNA Sequence
caaggctggtatcctgagctggcccggcctgcctgcctgcccgcccaccatgctggccactcaccttctcttctctcctctcaggagccggcatcatggattccttcaaagtagtgctggaggggccagcaccttggggcttccggctgcaagggggcaaggacttcaatgtgcccctctccatttcccggctcactcctgggggcaaagcggcgcaggccggagtggccgtgggtgactgggtgctgagcatcgatggcgagaatgcgggtagcctcacacacatcgaagctcagaacaagatccgggcctgcggggagcgcctcagcctgggcctcagcagggcccagccggttcagagcaaaccgcagaaggcctccgcccccgccgcggaccctccgcggtacacctttgcacccagcgtctccctcaacaagacggcccggccctttggggcgcccccgcccgctgacagcgccccgcagcagaatggacagccgctccgaccgctggtcccagatgccagcaagcagcggctgatggagaacacagaggact

SEQ ID NO: 1946 - DNA, 550 bp, Artificial
  cDNA Sequence
tttcaacatttcagaaattttatataaaaatctgggtttctggctttcttggaaattacaagatctggccgctctgggtccgaatgtccacttggccacggctggccggagggagcagcggctgcgcacaaattcacacctgtgtcctccgctctgcccgggccccacccagccgctcctcccatctctctgcctcttggtccccgaaggcacctgtgggtttgaacatgctgaagaccctgaagtccttgaagacaaacaagtattttgttctgttgtctgtgtccctggaagatcctttcctggagttcacggggcctggggcaagggtgcaatcagaagcccgcgtctccaaagtgaacatcagtcgctcctcccttgtggtctgcaggacccgagggctcccacgacttattcagaggtctgtgaagacgcacctttcatttaacagctcagtgttccagtgaccggaggtgaggtcgcagctgctggtcccacagagcctgtctctggcgttagttgtttagatgtcagaattggtgaaaagttt

SEQ ID NO: 1947 - DNA, 1032 bp, Artificial
  cDNA Sequence
ggggcccgggtcagcgcttgagccgggagaagagtttgagatcgtggaccgaagccagctgcccggcccaggcgacctgcggagcgcaacgaggccgcgggcggccgagggctggtcggcgcccatcctgaccctggcacgcagggccaccgggaacctgtcggcgagctgcgggagcgcgctgcgcgcggccgcggggctgggcggcggggacagcggggacggcacggcgcgcgcagcttctaagtgccagatgatggaggagcgtgccaacctgatgcacatgatgaaactcagcatcaaggtgttgctccagtcggctctgagcctgggccgcagcctggatgcggaccatgcccccttgcagcagttctttgtagtgatggagcactgcctcaaacatgggctgaaagttaagaagagttttattggccaaaataaatcattctttggtcctttggagctggtggagaaactttgtccagaagcatcagatatagcgactagtgtcagaaatcttccagaattaaagacagctgtgggaagaggccgagcgtggctttatcttgcactcatgcaaaagaaactggcagattatctgaaagtgcttatagacaataaacatctcttaagcgagttctatgagcctgaggctttaatgatggaggaagaagggatggtgattgttggtctgctggtgggactcaatgttctcgatgccaatctctgcttgaaaggagaagacttggattctcaggttggagtaatagatttttccctctaccttaaggatgtgcaggatcttgatggtggcaaggagcatgaaagaattactgatgtccttgatcaaaaaaattatgtggaagaacttaaccggcacttgagctgcacagttggggatcttcaaaccaagatagatggcttggaaaagactaactcaaagcttcaagaagagctttcagctgcaacagaccgaatttgctcacttcaagaagaacagcagcagttaagagaacaaaatgaattaattcg

SEQ ID NO: 1948 - DNA, 864 bp, Artificial
  cDNA Sequence
ggagccgtctgggagaggcctctggagcaggaggcccagtggctcttctgacccaaggccccgccgtccagcttctaagtgccagatgatggaggagcgtgccaacctgatgcacatgatgaaactcagcatcaaggtgttgctccagtcggctctgagcctgggccgcagcctggatgcggaccatgcccccttgcagcagttctttgtagtgatggagcactgcctcaaacatgggctgaaagttaagaagagttttattggccaaaataaatcattctttggtcctttggagctggtggagaaactttgtccagaagcatcagatatagcgactagtgtcagaaatcttccagaattaaagacagctgtgggaagaggccgagcgtggctttatcttgcactcatgcaaaagaaactggcagattatctgaaagtgcttatagacaataaacatctcttaagcgagttctatgagcctgaggctttaatgatggaggaagaagggatggtgattgttggtctgctggtgggactcaatgttctcgatgccaatctctgcttgaaaggagaagacttggattctcaggttggagtaatagatttttccctctaccttaaggatgtgcaggatcttgatggtggcaaggagcatgaaagaattactgatgtccttgatcaaaaaaattatgtggaagaacttaaccggcacttgagctgcacagttggggatcttcaaaccaagatagatggcttggaaaagactaactcaaagcttcaagaagagctttcagctgcaacagaccgaatttgctcacttcaagaagaacagcagcagttaagagaacaaaatgaattaattcg

SEQ ID NO: 1949 - DNA, 1019 bp, Artificial
  cDNA Sequence
cccagtggctcttctgacccaaggccccgccgtccaggtagggggctgtggcctctagggatcagggactacttacctgcgaatcccggttgcccgcccgccagcacgtccgttccctaagcagaccgcctggcctcctgcctgacccgtcttctcaccgttgcccggagtctgacctccccacgctcagtccactaacgaagctatccctgctcctgccccacagcttctaagtgccagatgatggaggagcgtgccaacctgatgcacatgatgaaactcagcatcaaggtgttgctccagtcggctctgagcctgggccgcagcctggatgcggaccatgcccccttgcagcagttctttgtagtgatggagcactgcctcaaacatgggctgaaagttaagaagagttttattggccaaaataaatcattctttggtcctttggagctggtggagaaactttgtccagaagcatcagatatagcgactagtgtcagaaatcttccagaattaaagacagctgtgggaagaggccgagcgtggctttatcttgcactcatgcaaaagaaactggcagattatctgaaagtgcttatagacaataaacatctcttaagcgagttctatgagcctgaggctttaatgatggaggaagaagggatggtgattgttggtctgctggtgggactcaatgttctcgatgccaatctctgcttgaaaggagaagacttggattctcaggttggagtaatagatttttccctctaccttaaggatgtgcaggatcttgatggtggcaaggagcatgaaagaattactgatgtccttgatcaaaaaaattatgtggaagaacttaaccggcacttgagctgcacagttggggatcttcaaaccaagatagatggcttggaaaagactaactcaaagcttcaagaagagctttcagctgcaacagaccgaatttgctcacttcaagaagaacagcagcagttaagagaacaaaatgaattaattcg

SEQ ID NO: 1950 - DNA, 269 bp, Artificial
  cDNA Sequence
cagttctttgtagtgatggagcactgcctcaaacatgggctgaaagttaagaagagttttattggccaaaataaatcattctttggtcctttggagctggtggagaaactttgtccagaagcatcagatatagcgactagtgtcagaaatcttccagaattaaagacagctgtgggaagaggccgagcgtggctttatcttgcactcatgcaaaagaaactggcagattatctgaaagtgcttatagacaataaacatctcttaaggta

SEQ ID NO: 1951 - DNA, 527 bp, Artificial
  cDNA Sequence
gaattctaggacagctgtgggaagaggccgagcgtggctttatcttgcactcatgcaaaagaaactggcagattatctgaaagtgcttatagacaataaacatctcttaagcgagttctatgagcctgaggctttaatgatggaggaagaagggatggtgattgttggtctgctggtgggactcaatgttctcgatgccaatctctgcttgaaaggagaagacttggattctcaggttggagtaatagatttttccctctaccttaaggatgtgcaggatcttgatggtggcaaggactgcacagttggggatcttcaaaccaagatagatggcttggaaaagactaactcaaagcttcaagaagagctttcagctgcaacagaccgaatttgctcacttcaagaagaacagcagcagttaagagaacaaaatgaattaattcgagaaagaagtgaaaagagtgtagagataacaaaacaggataccaaagttgagctggagacttacaagcaaactcggcaaggtc

SEQ ID NO: 1952 - DNA, 1112 bp, Artificial
  cDNA Sequence
caggttgcagcactcggagcgggcgaggcagggggctgaggagcggagccacaagctgcagcaggagctgggcgggaggatcggcgccctgcagctgcagctctcccagctgcacgagcaatgctcaagcctggagaaagaattgaaatcagaaaaagagcaaagacaggctcttcagcgcgaattacagcacgagaaagacacttcctctctactcaggatggagctgcaacaagtggaaggactgaaaaaggagttgcgggagcttcaggacgagaaggcagagctgcagaagatctgcgaggagcaggaacaagccctccaggaaatgggcctgcacctcagccagtccaagctgaagatggaagatataaaagaagtgaaccaggcactgaagggccacgcctggctgaaagatgacgaagcgacacactgtaggcagtgtgagaaggagttctccatttcccggagaaagcaccactgccggaactgtggccacatcttctgcaacacctgctccagcaacgagctggccctgccctcctaccccaagccggtgcgagtgtgcgacagctgccacaccctgctcctgcagcgctgctcctccacggcctcctgaacgtccgtcctcaggagcacagcctcacggacagtgccaaaccctgtgggtctccaggggcttgggaaatgtgttctttcccaagagtatcaaaggaaagaatcaaatttcttgcccggtcactggcactccagaagacagcgtgccggaaccggcagctctcacctttctgtgacttgttcggaattaactcctctggatggaaacttccatcttacttggttacatcacggctctggttcagatacaacttcatgattttgctactatcatttttcacttttcaaagaatttaacctattttacagcagttcagttctgctagtgagtagttttcctctcctaccttccttctaaaaacctgattcatgcacagcgtttgacacacatggagtctgccagtgtgccttctctgcttcagacaagagatctgccatttcatgcccttgtgactacctatcattggccctgcaataaaatcatttatttttca

SEQ ID NO: 1953 - DNA, 1210 bp, Artificial
  cDNA Sequence
gctcagttgcctgaggacagcagtgcagttgacatggatattctctttcctctggacagtgttattggtacagagctgtgccccagccccattccccagatcatccatttcgtcctctttgttgtgttcagcctggtgatcctgattatcttacgcctctacattcccagggagccgtcctcagtgcctcccagagaggaggacagcgagaatgatcaagctgaagtgggggaatggctcaggatcggaaataaatatatcactttgaaagattacagaattctcttgaaagaactggagaaccttgagatctacactttcctgtcgaaaaagtgcctgaagaagctctctagggagggcagctcccatcaccttccacgccaagtccgcccagggccagtgtacaaaccagcacctgctaggaaccaccggccacgtggggggcgtgggaaagcttctcccaccagcttccatgtgtccccacgggctcccctggctcctctggcctccatgccgtcatcagtcccgaagacctccgtagagtccttggggtctccatcatccctgagctcctccaagccacgagagcctctgtgtcccctgaagcacccttcacaccagccacctgcgagcaccctatcaccaaacccgaccagctccacagaatccttggggtatctgtcatccctgagctcctcccagccaccagagcctttgcgtcccctgaagcacccttcacacaagccacgtgggcgttcccttccccgacgacggaatcctggctgggtgtcctggtccgactccatgcaggctgattccgaaactgacaccataatatgcccaatgtgcaaggcccctgagcgctcctgtccacacacctggtgggtgccttctagccctcgagtgatccgaggcgttggtcgctgcagtgatcccaacctgggcctctcctggaggcaggaggctgctagagcctggtgccactgcacctcctcacagttcccattcaagcaccctaatcttcccacccacctaccaaaggcttccttctagggagaccccacatgcaggcaggtggaggcaggggtcccgctttcctcagcctggatgtgccaacgctgctggacgcataagacaccaaaatcccagacactcccatggacaccgaatatccgacatccacgaacaattgggaatctcctgaggacaa

SEQ ID NO: 1954 - DNA, 1117 bp, Artificial
  cDNA Sequence
cgcgcgccgcagccgtcgggatcacctcggggttgcgctgcttctccagcaagtgcatgcgcgccatggtctcagtcagcatgtctatgagcagttcctgctgcagcttcaggtagttgttctcctccagcaacacttggcttttggaccgctgcacctgcgccttccagccccaggcggtccgcgagagcagcggcgaccgcgtcctcgccagctggctctcagtggtccaccgcccgccgcggaacacgaaggcctggttgctgaggcgcatgcacggcgcgccgtaggcgaggcccagctcggcctggcgcgtgttgtggtccagcaggtagaaggtggacagggagggcatgcggcgcagtggcggccgccgtggcgagaagggccgcgagatgtgatcggcccaaaactgctgcagcgtctgccacaggcggctggcatggctcgtagccgagcactcgaaggttgccagggcgtggaccttgtagggcacgcaggtgctcgaaggggagcctcgggagcgctggcgactcgtgctgcgctcttgtctcgggagcccggatgtccagaatgatgaaggcgagccagggggcgctgctgggagacaagagtccggaattttccaagaagtgctctgaaaggtggaagacaatgtccgggaaagagaagtctaaatttgatgaaatggcaaagacggataaagtgcactgtgatcgggaaatgaagggaccagctaagggaggcaagaagaagaaggatcctagtgcccccaaaaggccaccatctggattcttcctgttctcttcggaaatccgccccaagatcaaatccacaaaccctggcatctctattggagatgtggcaaaaaagctgggtgagatgtggaataacttaaatgacagtgaaaagcagccttacatcactaagacggcaaagctgaaggagaagtacgagaaggatgttgctgattctaagtcgaaagggaagtttgatggctcaaagcgtcctgctaaagttgcctggaaaaaggtggaagaggaagatgaagacgaggaggagatgaggaggaggatgaataaacaaagtgtttatctgtcaaaaaaaaaaaagtaaa

SEQ ID NO: 1955 - DNA, 4205 bp, Artificial
  cDNA Sequence
agggccgggcttcgtgcggtggggctcgctcgcgcggcagcggtggccgaggcctcttggttctgcggcacgtgacggtcgggccgcctccgcctctctctttactgcggcgcggggcaaggtgtgcgggcgggaaggggcacgggcacccccgcggtccccgggaggctagagatcatggaagggaagtggttgctgtgtatgttactggtgcttggaactgctattgttgaggctcatgatggacatgatgatgatgtgattgatattgaggatgaccttgacgatgtcattgaagaggtagaagactcaaaaccagataccactgctcctccttcatctcccaaggttacttacaaagctccagttccaacaggggaagtatattttgctgattcttttgacagaggaactctgtcagggtggattttatccaaagccaagaaagacgataccgatgatgaaattgccaaatatgatggaaagtgggaggtagaggaaatgaaggagtcaaagcttccaggtgataaaggacttgtgttgatgtctcgggccaagcatcatgccatctctgctaaactgaacaagcccttcctgtttgacaccaagcctctcattgttcagtatgaggttaatttccaaaatggaatagaatgtggtggtgcctatgtgaaactgctttctaaaacaccagaactcaacctggatcagttccatgacaagaccccttatacgattatgtttggtccagataaatgtggagaggactataaactgcacttcatcttccgacacaaaaaccccaaaacgggtatctatgaagaaaaacatgctaagaggccagatgcagatctgaagacctattttactgataagaaaacacatctttacacactaatcttgaatccagataatagttttgaaatactggttgaccaatctgtggtgaatagtggaaatctgctcaatgacatgactcctcctgtaaatccttcacgtgaaattgaggacccagaagaccggaagcccgaggattgggatgaaagaccaaaaatcccagatccagaagctgtcaagccagatgactgggatgaagatgcccctgctaagattccagatgaagaggccacaaaacccgaaggctggttagatgatgagcctgagtacgtacctgatccagacgcagagaaacctgaggattgggatgaagacatggatggagaatgggaggctcctcagattgccaaccctagatgtgagtcagctcctggatgtggtgtctggcagcgacctgtgattgacaaccccaattataaaggcaaatggaagcctcctatgattgacaatcccagttaccagggaatctggaaacccaggaaaataccaaatccagatttctttgaagatctggaacctttcagaatgactccttttagtgctattggtttggagctgtggtccatgacctctgacattttttttgacaactttatcatttgtgctgatcgaagaatagttgatgattgggccaatgatggatggggcctgaagaaagctgctgatggggctgctgagccaggcgttgtggggcagatgatcgaggcagctgaagagcgcccgtggctgtgggtagtctatattctaactgtagcccttcctgtgttcctggttatcctcttctgctgttctggaaagaaacagaccagtggtatggagtataagaaaactgatgcacctcaaccggatgtgaaggaagaggaagaagagaaggaagaggaaaaggacaagggagatgaggaggaggaaggagaagagaaacttgaagagaaacagaaaagtgatgctgaagaagatggtggcactgtcagtcaagaggaggaagacagaaaacctaaagcagaggaggatgaaattttgaacagatcaccaagaaacagaaagccacgaagagagtgaaacaatcttaagagcttgatctgtgatttcttctccctcctcccctgcaagagtggtcctaggagaggacctggcacaccttaggttgacattcagaaaacttcaagacatcaccatcagcaggctccagttgaacactagtctgtgtaactttaaacatctagcagtaaatacttgcagttgtgatataaaggaccctgtttctgtagaaaagaaaacatttaacataatggttgtgaaatgtaacatgaagcaaactaacttttttttttttaacatctttgtttttaaaatagaatgatagaactttgccagtctttaagatcttggcttaatttaatgtattaatctgtttgtgcaaacataataccaccatttaaaaatgttagggagatgagttgcagtttttataatagattttttttaaagtttggtattgtaaaacattcacacctctgtccctcaaaattgataattacgtttaaagtgcagtcatttgtggttagaatcttgttttgtttgcttccattattgagttcctcctaaggaaattgaggagagggactgaatagaagcccaaattcatataaaagttgcgtttaagttgtattaaaaatagatatataagaaaaaattctttcacttgatgtttgttagaccagaaagtgtgtgtgttctgtagctcagttcccagacagctttttaggtagtggaggaggtggcttcatgtggcacttgggcatttatattccacttgggagggtcaggctgtggccttctggagcaggtggcttgttaaggaatgctagcagggcatggcacgtgagctccggaatagatgtcttcatcacttcttccactgtgtgttgacactgttttccttacctatttcctcagatccccagctttctcctctgctatgcattttcttcacagtgcagcttgcagtccgttgctgaaaatgattataagccctgcataatgttaagctttattgtgattacgtgtatgtttcttctttcttttaagcagacccatacctttccagggtcaaagtacagaatagaatacattgatacaaagtacagaaaaatactttgatttttatccatttcttttactctgtgtaaagacttgagaagtctaattcacaggcaaaccaatacagaattgactgcagttgaacagactagaagtatttgtgggaggagtgacatgaagcatgagttatctgattttttttgtagctgctatatattttaagccttcatttgcaattcatgtaacagttgtgtcataaattacacaataaagcagtcctgttcaaatttttttttaacgtggcttgtagaatttttaaaaaagtgatcttaggtttgttttttcatgcgggatgcagatgggtgctatcagagcctctcccacaccactatagtgtaataatgttattattactctacactgaaacgtattcagagttagatattattttagcttcagttgttctttagaggctttcaaatgtaccgatgatactgtttcttgcactgaatatataaacactccacagtgtttatattgggaagatattgggaaggaaatatatttgtaaaagatgaaggctgtatctatttttttttctttttaaagtttgttcacttaaattcttttgaggatgggatgtatttttcttgctgttcagtgctttttccttttcatctgttgttctgtggtcacagtgaccttagctacatagcagactttcccaaatgtattgattacaaataaacagttgttacttagcaagacctgaaaatatgtctgcaggtttctccttgaagcaaatgtgtgggatcattgcatttccagaaatctgcctccttcaccctccgttgacagtatatgtcatgcctcactttcttctagctgagctttaaatcattagagcttaaattgtcagatcgttcattgcctttccagggttatttagtaaagtttgttgaaaacaaaaacgccttttcttggttcttttttcagttattttgaaggtccagcatcctgattaaatgtctgacacattaatgaatgaccagcagcagctttcagctcttaaaaagacacttatattttgattttacatgctggttacctgttccattgttgtcaaatgcccactctccatcagatgtgttcctccattttcttatccacaaagtactcctcacttttcaatttgtcatgttactaaa

SEQ ID NO: 1956 - DNA, 630 bp, Artificial
  cDNA Sequence
agggccgggcttcgtgcggtggggctcgctcgcgcggcagcggtggccgaggcctcttggttctgcggcacgtgacggtcgggccgcctccgcctctctctttactgcggcgcggggcaaggtgtgcgggcgggaaggggcacgggcacccccgcggtccccgggaggctagagatcatggaagggaagtggttgctgtgtatgttactggtgcttggaactgctattgttgaggctcatgatggacatgatgatgatgtgattgatattgaggatgaccttgacgatgtcattgaagaggtagaagactcaaaaccagataccactgctcctccttcatctcccaaggttacttacaaagctccagttccaacaggggaagtatattttgctgattcttttgacagaggaactctgtcagggtggattttatccaaagccaagaaagacgataccgatgatgaaattgccaaatatgatggaaagtgggaggtagaggaaatgaaggagtcaaagcttccaggtgataaaggacttgtgttgatgtctcgggccaagcatcatgccatctctgctaaactgaacaagcccttcctgtttgacaccaagcctctcattgttcagtaagtg

SEQ ID NO: 1957 - DNA, 3784 bp, Artificial
  cDNA Sequence
ggtggattttatccaaagccaagaaagacgataccgatgatgaaattgccaaatatgatggaaagtgggaggtagaggaaatgaaggagtcaaagcttccaggtgataaaggacttgtgttgatgtctcgggccaagcatcatgccatctctgctaaactgaacaagcccttcctgtttgacaccaagcctctcattgttcagtatgaggttaatttccaaaatggaatagaatgtggtggtgcctatgtgaaactgctttctaaaacaccagaactcaacctggatcagttccatgacaagaccccttatacgattatgtttggtccagataaatgtggagaggactataaactgcacttcatcttccgacacaaaaaccccaaaacgggtatctatgaagaaaaacatgctaagaggccagatgcagatctgaagacctattttactgataagaaaacacatctttacacactaatcttgaatccagataatagttttgaaatactggttgaccaatctgtggtgaatagtggaaatctgctcaatgacatgactcctcctgtaaatccttcacgtgaaattgaggacccagaagaccggaagcccgaggattgggatgaaagaccaaaaatcccagatccagaagctgtcaagccagatgactgggatgaagatgcccctgctaagattccagatgaagaggccacaaaacccgaaggctggttagatgatgagcctgagtacgtacctgatccagacgcagagaaacctgaggattgggatgaagacatggatggagaatgggaggctcctcagattgccaaccctagatgtgagtcagctcctggatgtggtgtctggcagcgacctgtgattgacaaccccaattataaaggcaaatggaagcctcctatgattgacaatcccagttaccagggaatctggaaacccaggaaaataccaaatccagatttctttgaagatctggaacctttcagaatgactccttttagtgctattggtttggagctgtggtccatgacctctgacattttttttgacaactttatcatttgtgctgatcgaagaatagttgatgattgggccaatgatggatggggcctgaagaaagctgctgatggggctgctgagccaggcgttgtggggcagatgatcgaggcagctgaagagcgcccgtggctgtgggtagtctatattctaactgtagcccttcctgtgttcctggttatcctcttctgctgttctggaaagaaacagaccagtggtatggagtataagaaaactgatgcacctcaaccggatgtgaaggaagaggaagaagagaaggaagaggaaaaggacaagggagatgaggaggaggaaggagaagagaaacttgaagagaaacagaaaagtgatgctgaagaagatggtggcactgtcagtcaagaggaggaagacagaaaacctaaagcagaggaggatgaaattttgaacagatcaccaagaaacagaaagccacgaagagagtgaaacaatcttaagagcttgatctgtgatttcttctccctcctcccctgcaagagtggtcctaggagaggacctggcacaccttaggttgacattcagaaaacttcaagacatcaccatcagcaggctccagttgaacactagtctgtgtaactttaaacatctagcagtaaatacttgcagttgtgatataaaggaccctgtttctgtagaaaagaaaacatttaacataatggttgtgaaatgtaacatgaagcaaactaacttttttttttttaacatctttgtttttaaaatagaatgatagaactttgccagtctttaagatcttggcttaatttaatgtattaatctgtttgtgcaaacataataccaccatttaaaaatgttagggagatgagttgcagtttttataatagattttttttaaagtttggtattgtaaaacattcacacctctgtccctcaaaattgataattacgtttaaagtgcagtcatttgtggttagaatcttgttttgtttgcttccattattgagttcctcctaaggaaattgaggagagggactgaatagaagcccaaattcatataaaagttgcgtttaagttgtattaaaaatagatatataagaaaaaattctttcacttgatgtttgttagaccagaaagtgtgtgtgttctgtagctcagttcccagacagctttttaggtagtggaggaggtggcttcatgtggcacttgggcatttatattccacttgggagggtcaggctgtggccttctggagcaggtggcttgttaaggaatgctagcagggcatggcacgtgagctccggaatagatgtcttcatcacttcttccactgtgtgttgacactgttttccttacctatttcctcagatccccagctttctcctctgctatgcattttcttcacagtgcagcttgcagtccgttgctgaaaatgattataagccctgcataatgttaagctttattgtgattacgtgtatgtttcttctttcttttaagcagacccatacctttccagggtcaaagtacagaatagaatacattgatacaaagtacagaaaaatactttgatttttatccatttcttttactctgtgtaaagacttgagaagtctaattcacaggcaaaccaatacagaattgactgcagttgaacagactagaagtatttgtgggaggagtgacatgaagcatgagttatctgattttttttgtagctgctatatattttaagccttcatttgcaattcatgtaacagttgtgtcataaattacacaataaagcagtcctgttcaaatttttttttaacgtggcttgtagaatttttaaaaaagtgatcttaggtttgttttttcatgcgggatgcagatgggtgctatcagagcctctcccacaccactatagtgtaataatgttattattactctacactgaaacgtattcagagttagatattattttagcttcagttgttctttagaggctttcaaatgtaccgatgatactgtttcttgcactgaatatataaacactccacagtgtttatattgggaagatattgggaaggaaatatatttgtaaaagatgaaggctgtatctatttttttttctttttaaagtttgttcacttaaattcttttgaggatgggatgtatttttcttgctgttcagtgctttttccttttcatctgttgttctgtggtcacagtgaccttagctacatagcagactttcccaaatgtattgattacaaataaacagttgttacttagcaagacctgaaaatatgtctgcaggtttctccttgaagcaaatgtgtgggatcattgcatttccagaaatctgcctccttcaccctccgttgacagtatatgtcatgcctcactttcttctagctgagctttaaatcattagagcttaaattgtcagatcgttcattgcctttccagggttatttagtaaagtttgttgaaaacaaaaacgccttttcttggttcttttttcagttattttgaaggtccagcatcctgattaaatgtctgacacattaatgaatgaccagcagcagctttcagctcttaaaaagacacttatattttgattttacatgctggttacctgttccattgttgtcaaatgcccactctccatcagatgtgttcctccattttcttatccacaaagtactcctcacttttcaatttgtcatgttactaaa

SEQ ID NO: 1958 - DNA, 449 bp, Artificial
  cDNA Sequence
ggatcagttccatgacaagaccccttatacgattatgtttggtccagataaatgtggagaggactataaactgcacttcatcttccgacacaaaaaccccaaaacgggtatctatgaagaaaaacatgctaagaggccagatgcagatctgaagacctattttactgataagaaaacacatctttacacactaatcttgaatccagataatagttttgaaatactggttgaccaatctgtggtgaatagtggaaatctgctcaatgacatgactcctcctgtaaatccttcacgtgaaattgaggacccagaagaccggaagcccgaggattgggatgaaagaccaaaaatcccagatccagaagctgtcaagccagatgactgggatgaagatgcccctgctaagattccagatgaagaggccacaaaacccgaaggctggttagatg

SEQ ID NO: 1959 - DNA, 2388 bp, Artificial
  cDNA Sequence
cttagaagagaaacagaaaagtgatgctgaagaagatggtggcactgtcagtcaagaggaggaagacagaaaacctaaagcagaggaggatgaaattttgaacagatcaccaagaaacagaaagccacgaagagagtgaaacaatcttaagagcttgatctgtgatttcttctccctcctcccctgcaagagtggtcctaggagaggacctggcacaccttaggttgacattcagaaaacttcaagacatcaccatcagcaggctccagttgaacactagtctgtgtaactttaaacatctagcagtaaatacttgcagttgtgatataaaggaccctgtttctgtagaaaagaaaacatttaacataatggttgtgaaatgtaacatgaagcaaactaacttttttttttttaacatctttgtttttaaaatagaatgatagaactttgccagtctttaagatcttggcttaatttaatgtattaatctgtttgtgcaaacataataccaccatttaaaaatgttagggagatgagttgcagtttttataatagattttttttaaagtttggtattgtaaaacattcacacctctgtccctcaaaattgataattacgtttaaagtgcagtcatttgtggttagaatcttgttttgtttgcttccattattgagttcctcctaaggaaattgaggagagggactgaatagaagcccaaattcatataaaagttgcgtttaagttgtattaaaaatagatatataagaaaaaattctttcacttgatgtttgttagaccagaaagtgtgtgtgttctgtagctcagttcccagacagctttttaggtagtggaggaggtggcttcatgtggcacttgggcatttatattccacttgggagggtcaggctgtggccttctggagcaggtggcttgttaaggaatgctagcagggcatggcacgtgagctccggaatagatgtcttcatcacttcttccactgtgtgttgacactgttttccttacctatttcctcagatccccagctttctcctctgctatgcattttcttcacagtgcagcttgcagtccgttgctgaaaatgattataagccctgcataatgttaagctttattgtgattacgtgtatgtttcttctttcttttaagcagacccatacctttccagggtcaaagtacagaatagaatacattgatacaaagtacagaaaaatactttgatttttatccatttcttttactctgtgtaaagacttgagaagtctaattcacaggcaaaccaatacagaattgactgcagttgaacagactagaagtatttgtgggaggagtgacatgaagcatgagttatctgattttttttgtagctgctatatattttaagccttcatttgcaattcatgtaacagttgtgtcataaattacacaataaagcagtcctgttcaaatttttttttaacgtggcttgtagaatttttaaaaaagtgatcttaggtttgttttttcatgcgggatgcagatgggtgctatcagagcctctcccacaccactatagtgtaataatgttattattactctacactgaaacgtattcagagttagatattattttagcttcagttgttctttagaggctttcaaatgtaccgatgatactgtttcttgcactgaatatataaacactccacagtgtttatattgggaagatattgggaaggaaatatatttgtaaaagatgaaggctgtatctatttttttttctttttaaagtttgttcacttaaattcttttgaggatgggatgtatttttcttgctgttcagtgctttttccttttcatctgttgttctgtggtcacagtgaccttagctacatagcagactttcccaaatgtattgattacaaataaacagttgttacttagcaagacctgaaaatatgtctgcaggtttctccttgaagcaaatgtgtgggatcattgcatttccagaaatctgcctccttcaccctccgttgacagtatatgtcatgcctcactttcttctagctgagctttaaatcattagagcttaaattgtcagatcgttcattgcctttccagggttatttagtaaagtttgttgaaaacaaaaacgccttttcttggttcttttttcagttattttgaaggtccagcatcctgattaaatgtctgacacattaatgaatgaccagcagcagctttcagctcttaaaaagacacttatattttgattttacatgctggttacctgttccattgttgtcaaatgcccactctccatcagatgtgttcctccattttcttatccacaaagtactcctcacttttcaatttgtcatgttactaaa

SEQ ID NO: 1960 - DNA, 589 bp, Artificial
  cDNA Sequence
agagggagagggtgctgattactagctaaaagacttagaaatttttgcaaacatggactcatgatagtttttgggtgatgagtcttcttgtaggatagcttgaaagaggaggaggaaactagaggccctggtaatataaggtaacattaagtatcctgatgtcagtaatggagaagagtgaaagactatgattgattgggtgactgtgtgggcagaggatgtgaggagaaaaggacatcttgtgtgtgtgtgcgcacacatttttagttgtgtatcttctacttgttttctcccccaccttgtacctgtactttctcaagcccaaaaatgaaaatttacctgctaccaaccacatcatcttgtgcatctgtgtagctcagtttttatttctttagatctgtggtcctccgtggaaagagagccactaccccaagacacatctaatataatacacagggcgcttacgtggttagaaaagaagagataagccggccacggcgcccggccatctctgttatttcattgtaatgttttaacgggtaccccctgtaaattagtgtatgaaagggcttttgtctgttgtaaagca

SEQ ID NO: 1961 - DNA, 535 bp, Artificial
  cDNA Sequence
cagccaccgagtaacttgaatcagaactccgcgaataaccaggggtctgtgctggactacggcaatacaaaacccctttctcattacaaagcggactgtgggcaaggcagcccggggtctggccagagcaagccagccctgatggcttatcttccccagcagctgtcccatataagtcacgagcagaactccctgtttctgatgaagccaaagccaggaaatatgcctttccgatcactggttccacctggccaggagcagaacccttccagtgtccctgtgcaagcccaggctaccagtgttgggacccagccgcctgccgtgtccgtggccagctcccacaacagctccccctatctcagcagccagcaacaggccgctgtaatgaagcagcatcagttgcttttggaccaacagaaacaaagggagcagcagcaaaagcatttacagcaacagcagttccttcagaggcaacagcaccttctcgcggaacaggagaagcaacagtttcagcgccatctgacccgcccaccac

SEQ ID NO: 1962 - DNA, 516 bp, Artificial
  cDNA Sequence
ccagcctacttctccctgcaggtgatctcggcgcgcagggccttccgcgtgtcgccgccgctcaccaccggcccacccgagttcgagcgcgtctaccgagcccaggtgaactgcagcgagtacttcccgctgttcctcgccacgctctgggtcgccggcatcttctttcatgaaggggcggcggccctgtgcggcctggtctacctgttcgcgcgcctccgctacttccagggctacgcgcgctccgcgcagctcaggctggcaccgctgtacgcgagcgcgcgcgccctctggctgctggtggcgctggctgcgctcggcctgctcgcccacttcctcccggccgcgctgcgcgccgcgctcctcggacggctccggacgctgctgccgtgggcctgagaccaaggcccccgggccgacggagccgggaaagaagagccggagcctccagctgccccggggaggggcgctcgcttccgcatcctagtctctatcattaaagttctagtgaccgag

SEQ ID NO: 1963 - DNA, 822 bp, Artificial
  cDNA Sequence
ccccagctcgccttcacacacagcccgtgccaccacaccgacggtaccatgaaggacgaggtagctctactggctgctgtcaccctcctgggagtcctgctgcaagcctacttctccctgcaggtgatctcggcgcgcagggccttccgcgtgtcgccgccgctcaccaccggcccacccgagttcgagcgcgtctaccgagcccaggtgaactgcagcgagtacttcccgctgttcctcgccacgctctgggtcgccggcatcttctttcatgaaggggcggcggccctgtgcggcctggtctacctgttcgcgcgcctccgctacttccagggctacgcgcgctccgcgcagctcaggtgagggccgggcggggagcggggcggggccggggaaagatcgcgggcgggcggggctcctggggagcgggaccgaagctgggggcgggcgacgggccggagcccagcgcctttggggattcggtgggcgagccctggcggcggccagaggaagtccccgtggggccagggttgcggcggggaagaagcgggcctcctcgcgccacctccccgctgaccgccgcccgcaggctggcaccgctgtacgcgagcgcgcgcgccctctggctgctggtggcgctggctgcgctcggcctgctcgcccacttcctcccggccgcgctgcgcgccgcgctcctcggacggctccggacgctgctgccgtgggcctgagaccaaggcccccgggccgacggagccgggaaagaagagccggagcctccagctgccccggggaggggcgctcgcttccgcatcctagtct

SEQ ID NO: 1964 - DNA, 541 bp, Artificial
  cDNA Sequence
gtcaccctcctgggagtcctgctgcaagcctacttctccctgcaggtgatctcggcgcgcagggccttccgcgtgtcgccgccgctcaccaccggcccacccgagttcgagcgcgtctaccgagcccaggtgaactgcagcgagtacttcccgctgttcctcgccacgctctgggtcgccggcatcttctttcatgaaggggcggcggccctgtgcggcctggtctacctgttcgcgcgcctccgctacttccagggctacgcgcgctccgcgcagctcaggctggcaccgctgtacgcgagcgcgcgcgccctctggctgctggtggcgctggctgcgctcggcctgctcgcccacttcctcccggccgcgctgcgcgccgcgctcctcggacggctccggacgctgctgccgtgggcctgagaccaaggcccccgggccgacggagccgggaaagaagagccggagcctccagctgccccggggaggggcgctcgcttccgcatcctagtctctatcattaaagttctagtgaccgaga

SEQ ID NO: 1965 - DNA, 452 bp, Artificial
  cDNA Sequence
ctccccctcctcccccagcctacttctccctgcaggtgatctcggcgcgcagggccttccgcgtgtcgccgccgctcaccaccggcccacccgagttcgagcgcgtctaccgagcccagtgaggcgcggcgggagggcgcggggcggggagcgagccccaggcgggtccgggtcgcaggaccatcccggccggcgcgctcatcccacccgcccaccgcagggtgaactgcagcgagtacttcccgctgttcctcgccacgctctgggtcgccggcatcttctttcatgaaggggcggcggccctgtgcggcctggtctacctgttcgcgcgcctccgctacttccagggctacgcgcgctccgcgcagctcaggctggcaccgctgtacgcgagcgcgcgcgccctctggctgctggtggcgctggctgcgctcggcctgctcgcccacttc

SEQ ID NO: 1966 - DNA, 2591 bp, Artificial
  cDNA Sequence
acggcccgttttccgccagctcgccgctcgctatggcgtcgctcaccgtgaaggcctaccttctgggcaaggaggacgcggcgcgcgagattcgccgcttcagcttctgctgcagccccgagcctgaggcggaagccgaggctgcggcgggtccgggaccctgcgagcggctgctgagccgggtggccgccctgttccccgcgctgcggcctggcggcttccaggcgcactaccgcgatgaggacggggacttggttgccttttccagtgacgaggaattgacaatggccatgtcctacgtgaaggatgacatcttccgaatctacattaaagagaaaaaagagtgccggcgggaccaccgcccaccgtgtgctcaggaggcgccccgcaacatggtgcaccccaatgtgatctgcgatggctgcaatgggcctgtggtaggaacccgctacaagtgcagcgtctgcccagactacgacttgtgtagcgtctgcgagggaaagggcttgcaccgggggcacaccaagctcgcattccccagccccttcgggcacctgtctgagggcttctcgcacagccgctggctccggaaggtgaaacacggacacttcgggtggccaggatgggaaatgggtccaccaggaaactggagcccacgtcctcctcgtgcaggggaggcccgccctggccccacggcagaatcagcttctggtccatcggaggatccgagtgtgaatttcctgaagaacgttggggagagtgtggcagctgcccttagccctctgggcattgaagttgatatcgatgtggagcacggagggaaaagaagccgcctgacccccgtctctccagagagttccagcacagaggagaagagcagctcacagccaagcagctgctgctctgaccccagcaagccgggtgggaatgttgagggcgccacgcagtctctggcggagcagatgaggaagatcgccttggagtccgaggggcgccctgaggcaagcctatggagtcggataactgttcaggaggagatgatgactggacccatctgtcttcaaaagaagtggacccgtctacaggtgaactccagtccctacagatgccagaatccgaagggccaagctctctggacccctcccaggagggacccacagggctgaaggaagctgccttgtacccacatctcccgccaggcaagctgacccgcggctgattgagtccctctcccagatgctgtccatgggcttctctgatgaaggcggctggctcaccaggctcctgcagaccaagaactatgacatcggagcggctctggacaccatccagtattcaaagcatcccccgccgttgtgaccacttttgcccacctcttctgcgtgcccctcttctgtctcatagttgtgttaagcttgcgtagaattgcaggtctctgtacgggccagtttctctgccttcttccaggatcaggggttagggtgcaagaagccatttagggcagcaaaacaagtgacatgaagggagggtccctgtgtgtgtgtgtgctgatgtttcctgggtgccctggctccttgcagcagggctgggcctgcgagacccaaggctcactgcagcgcgctcctgacccctccctgcaggggctacgttagcagcccagcacatagcttgcctaatggctttcactttctcttttgttttaaatgactcataggtccctgacatttagttgattattttctgctacagacctggtacactctgattttagataaagtaagcctaggtgttgtcagcaggcaggctggggaggccagtgttgtgggcttcctgctgggactgagaaggctcacgaagggcatccgcaatgttggtttcactgagagctgcctcctggtctcttcaccactgtagttctctcatttccaaaccatcagctgcttttaaaataagatctctttgtagccatcctgttaaatttgtaaacaatctaattaaatggcatcagcactttaaccaatgacgtttgcatagagagaaatgattgacagtaagtttattgttaatggttcttacagagtatctttaaaagtgccttaggggaaccctgtccctcctaacaagtgtatctcgattaataacctgccagtcccagatcacacatcatcatcgaagtcttccccagttataaagaggtcacatagtcgtgtgggtcgaggattctgtgcctccaggaccaggggcccaccctctgcccagggagtccttgcgtcccatgaggtcttcccgcaaggcctctcagacccagatgtgacggggtgtgtggcccgaggaagctggacagcggcagtgggcctgctgaggccttctcttgaggcctgtgctctgggggtcccttgcttagcctgtgctggaccagctggcctggggtccctctgaagagaccttggctgctcactgtccacatgtgaactttttctaggtggcaggacaaattgcgcccatttagaggatgtggctgtaacctgctggatgggactccatagctccttcccaggacccctcagctccccggcactgcagtctgcaga

SEQ ID NO: 1967 - DNA, 932 bp, Artificial
  cDNA Sequence
gcggagcccacggagcccacggagcccacggaggagcccacggaggagccccagcgtccgaacgggcagaccccctcgagccgcgaaggagcccgagaagcagccacgatgtgcggaatctttgcctacatgaactacagagtcccccggacgaggaaggagatcttcgaaaccctcatcaagggcctgcagcggctggagtacagaggctacgactcggcaggtgtggcgatcgatgggaataatcacgaagtcaaagaaagacacattcagctggtcaagaaaagggggaaagtcaaggctctcgatgaagaactttacagtaagtggaggacctctgagtgggaggagccgctgcagcgccggccgctttctaggaccgtattccaacagcgccggagaatggagattctcctttgtcccagctcagataaacagagggagggctaagcccgtgctgtaaaaccgggcttcgcagggtatgggatggtttattttaggtggtggcggcgcatggataatttttttaagtgtgaagggttacatacagtagttattttaattattccagcaaatgatactgcttctctgtttatggtagggatatatcattttctttttaaagcaagtttatttctgtgaagaagtgagctaagctacagacaagtagtaaataaccttcagcacgggtggtttgtgggcctgcgcggactcccagggtgggagctggtggggaggtgccatcggtgtgggtgacgtgacttgggtaacgacaccaggttgcactcacagtcctgggtcgaggcttgttgttcaagtgcggcaaactgattttcctttcatttagaacaagacagcatggacttaaaagtggagtttgagacacacttcggcattgcccacacgcgctgggccacccacggggtccccag

SEQ ID NO: 1968 - DNA, 510 bp, Artificial
  cDNA Sequence
ggagcccacggagcccacggagcccacggaggagcccacggaggagccccagcgtccgaacgggcagaccccctcgagccgcgaaggagcccgagaagcagccacgatgtgcggaatctttgcctacatgaactacagagtcccccggacgaggaaggagatcttcgaaaccctcatcaagggcctgcagcggctggagtacagaggctacgactcggcaggtgtggcgatcgatgggaataatcacgaagtcaaagaaagacacattcagctggtcaagaaaagggggaaagtcaaggctctcgatgaagaactttacaaacaagacagcatggacttaaaagtggagtttgagacacacttcggcattgcccacacgcgctgggccacccacggggtccccagtgctgtcaacagccaccctcagcgctcagacaaaggcaacgaatttgttgtcatccacaatgggatcatcacaaattacaaagatctgaggaaatttctggtaag

SEQ ID NO: 1969 - DNA, 2143 bp, Artificial
  cDNA Sequence
gtttgcagagagttctcaagccttgaaatcatctctcttcacatctgacatgaacctccttctcaatagcatttctctcttaacttttctttcagaatttgttgtcatccacaatgggatcatcacaaattacaaagatctgaggaaatttctggaaagcaaaggctacgagtttgagtcagaaacagatacagagaccatcgccaagctgattaaatatgtgttcgacaacagagaaactgaggacattacgttttcaacgttggtcgagagagtcattcagcagttggaaggtgcattcgcgctggttttcaagagtgtccactacccaggagaagccgttgccacacggagaggcagccccctgctcatcggagtccggagcaaatacaagctctccacagaacagatccctatcttatacaggacgtgcactctggagaatgtgaagaatatctgtaagacacggatgaagaggctggacagctccgcctgcctgcatgctgtgggcgacaaggccgtggaattcttctttgcttctgatgcaagcgctatcatagagcacaccaaccgggtcatcttcctggaggacgatgacatcgccgcagtggctgatgggaaactctccattcaccgggtcaagcgctcggccagtgatgacccatctcgagccatccagaccttgcagatggaactgcagcaaatcatgaaaggcaggtaacttcagtgcgtttatgcagaaggagatcttcgaacagccagaatcagttttcaatactatgagaggtcgggtgaattttgaaaccaacacagtgctcctgggtggcttgaaggaccacttgaaggagattcgacgatgccgacggctcatcgtgattggctgtggaaccagctaccacgctgccgtggctacgcggcaagttttggaggaactgactgagcttcctgtgatggttgaacttgctagtgattttctggacaggaacacacctgtgttcagggatgacgtttgctttttcatcagccagtcaggcgagaccgcggacaccctcctggcgctgcgctactgtaaggaccgcggcgctctcaccgtgggcgtcaccaacaccgtgggcagctccatctctcgcgagaccgactgcggcgtccacatcaacgcagggccggagatcggcgtggccagcaccaaggcttataccagtcagttcatctctctggtgatgtttggtttgatgatgtctgaagaccgaatttcactacaaaacaggaggcaagagatcatccgtggcttgagatctttacctgagctgatcaaggaagtgctgtctctggaggagaagatccacgacttggccctggagctctacacgcagagatcgctgctggtgatggggcggggctacaactatgccacctgcctggaaggagccctgaaaattaaagagataacctacatgcactcagaaggcatcctggctggggagctgaagcacgggcccctggcactgattgacaagcagatgcccgtcatcatggtcattatgaaggatccttgcttcgccaaatgccagaacgccctgcagcaagtcacggcccgccagggtcgccccattatactgtgctccaaggacgatactgaaagttccaagtttgcgtataagacaattgagctgccccacactgtggactgcctccagggcatcctgagcgtgattccgctgcagctgctgtccttccacctggctgttctccgaggatatgacgttgacttccccagaaatctggccaagtctgtaactgtggaatgaggctgagaccgtgacaagaccatcaccacctttcatctgattccagacctgtcccaacagcagggatgctacatgggaagagaagtggacatcccacatgttctgcgtgctcctgtagagcttgacagcttccacgtgccttctacccaagtgcttttgcttacagcagatactgtttctctgtgtcctgaagtcgccagaggagaagggaatcattgtttacacatggggatcagagcagacttctccactactgtgcaatagagatacagctctcttcagagtaactgtgaaccttttataaccaacactagagttagttttaaaagacaaga

SEQ ID NO: 1970 - DNA, 163 bp, Artificial
  cDNA Sequence
acgagtttgagtcagaaacagatacagagaccatcgccaagctgattaaatatgtgttcgacaacagagaaactgaggacattacgttttcaacgttggtcgagagagtcattcagcagttggagaggcagccccctgctcatcggagtccggagcaaataca

SEQ ID NO: 1971 - DNA, 410 bp, Artificial
  cDNA Sequence
ccccgtggcgcggcggcggggaggcgagggatctgaaacttgcccacccttcgggatattgcaggacgctgcatcatgagcgacagtaaatgtgacagtcagttttatagtgtgcaagtggcagactcaaccttcactgtcctaaaacgttaccagcagctgaaaccaattggctctggggcccaagggattgtttggcgccatcattgcagtgccttgccattcattggcaggatgaggccagtcagtgtcattgtcactccatggattaaccaggaagggatgctgtgtgaggggttgggctggccatctcttccttggtgtctcacttcaactgtgtgtccagcccagaacgtcagaatcgttagtctgaccctgaacgttagtctcttgcatggtaagacggtcag

SEQ ID NO: 1972 - DNA, 1459 bp, Artificial
  cDNA Sequence
tcaaccttcactgtcctaaaacgttaccagcagctgaaaccaattggctctggggcccaagggattgtttgtgctgcatttgatacagttcttgggataaatgttgcagtcaagaaactaagccgtccttttcagaaccaaactcatgcaaagagagcttatcgtgaacttgtcctcttaaaatgtgtcaatcataaaaatgtaagttattttgttaaatgtgtttacaccacaaaaaactctagaagaatttcaagatgtgtatttggttatggaattaatggatgctaacttatgtcaggttattcacatggagctggatcatgaaagaatgtcctaccttctttaccagatgctttgtggtattaaacatctgcattcagctggtataattcatagagatttgaagcctagcaacattgttgtgaaatcagactgcaccctgaagatccttgactttggcctggcccggacagcgtgcactaacttcatgatgaccccttacgtggtgacacggtactaccgggcgcccgaagtcatcctgggtatgggctacaaagagaacgttgatatctggtcagtgggttgcatcatgggagagctggtgaaaggttgtgtgatattccaaggcactgaccatattgatcagtggaataaagttattgagcagctgggaacaccatcagcagagttcatgaagaaacttcagccaactgtgaggaattatgtcgaaaacagaccaaagtatcctggaatcaaatttgaagaactctttccagattggatattcccatcagaatctgagcgagacaaaataaaaacaagtcaagccagagatctgttatcaaaaatgttagtgattgatcctgacaagcggatctctgtagacgaagctctgcgtcacccatacatcactgtttggtatgaccccgccgaagcagaagccccaccacctcaaatttatgatgcccagttggaagaaagagaacatgcaattgaagaatggaaagagctaatttacaaagaagtcatggattgggaagaaagaagcaagaatggtgttgtaaaagatcagccttcagatgcagcagtaagtagcaacgccactccttctcagtcttcatcgatcaatgacatttcatccatgtccactgagcagacgctggcctcagacacagacagcagtcttgatgcctcgacgggaccccttgaaggctgtcgatgataggttagaaatagcaaacctgtcagcattgaaggaactctcacctccgtgggcctgaaatgcttgggagttgatggaaccaaatagaaaaactccatgttctgcatgtaagaaacacaatgccttgccctactcagacctgataggattgcctgcttagatgataaaatgaggcagaatatgtctgaagaaaaaaattgcaagccacacttctagagattttgttcaagatca

SEQ ID NO: 1973 - DNA, 371 bp, Artificial
  cDNA Sequence
agataattagtttgttaaatgtgtttacaccacaaaaaactctagaagaatttcaagatgtgtatttggttatggaattaatggatgctaacttatgtcaggttattcacatggagctggatcatgaaagaatgtcctaccttctttaccagatgctttgtggtattaaacatctgcattcagctggtataattcatagagactgtgcatgcggcgcctgtggccctgcacctggaagctgggcatcagtttctctgcgtgaagggccagcaggagtgaggaaggagtggagcctcacttctgggatggagatggggatctgggacatctactacgtacttggactttcaataaaatgaaaacttctccaa

SEQ ID NO: 1974 - DNA, 689 bp, Artificial
  cDNA Sequence
gttattcacatggagctggatcatgaaagaatgtcctaccttctttaccagatgctttgtggtattaaacatctgcattcagctggtataattcatagagatttgaagcctagcaacattgttgtgaaatcagactgcaccctgaagatccttgactttggcctggcccggacagcgtgcactaacttcatgatgaccccttacgtggtgacacggtactaccgggcgcccgaagtcatcctgggtatgggctacaaagagaacgttgatatctggtcagtgggttgcatcatgggagagctggtgaaaggttgtgtgatattccaaggcactgaccgtatccttccccgcgaccttggccccgccatgctttcttaatgcctcaggcagcatgaccacctgcttacacgagcgctcacgaggacaaagtcgtaaaatccactccagactgtgttctaaggggggctttactgtatttgttaattagtgtcacaagccaagtggttcaatttcattctttatttttaacttgactacctgtgatgactttgagacttagagttcagttaaaccgattatattagctcttaattttgccaaaaatagctggacacatagaagaaattatttactctttgataagtatattctgatatttaaatgaaaatactgtattatttagtttattc

SEQ ID NO: 1975 - DNA, 822 bp, Artificial
  cDNA Sequence
gatattgatcagtggaataaagttattgagcagctgggaacaccatcagcagagttcatgaagaaacttcagccaactgtgaggaattatgtcgaaaacagaccaaagtatcctggaatcaaatttgaagaactctttccagattggatattcccatcagaatctgagcgagacaaaataaaaacaagtcaagccagagatctgttatcaaaaatgttagtgattgatcctgacaagcggatctctgtagacgaagctctgcgtcacccatacatcactgtttggtatgaccccgccgaagcagaagccccaccacctcaaatttatgatgcccagttggaagaaagagaacatgcaattgaagaatggaaagagctaatttacaaagaagtcatggattgggaagaaagaagcaagaatggtgttgtaaaagatcagccttcagatgcagcagtaagtagcaacgccactccttctcagtcttcatcgatcaatgacatttcatccatgtccactgagcagacgctggcctcagacacagacagcagtcttgatgcctcgacgggaccccttgaaggctgtcgatgataggttagaaatagcaaacctgtcagcattgaaggaactctcacctccgtgggcctgaaatgcttgggagttgatggaaccaaatagaaaaactccatgttctgcatgtaagaaacacaatgccttgccctactcagacctgataggattgcctgcttagatgataaaatgaggcagaatatgtctgaagaaaaaaattgcaagccacacttctagagattttgttcaagatca

SEQ ID NO: 1976 - DNA, 1497 bp, Artificial
  cDNA Sequence
cgccccgcctctaggcgccggccccggagcccggtccgcgagcagcggcggctgccggagggacgatgagctgcgcggggcgggcgggccctgcccggctcgccgcgctcgccctgctgacctgcagcctgtggccggcacgggcagacaacgcgagccaggagtactacacggcgctcatcaacgtgacggtgcaggagcccggccgcggcgccccgctcacgtttcgcatcgaccgcgggcgctacgggcttgactcccccaaggccgaggtccgcggccaggtgctggcgccgctgcccctccacggagttgctgatcatctgggctgtgatccacaaacccggttctttgtccctcctaatatcaaacagtggattgccttgctgcagaggggaaactgcacgtttaaagagaaaatatcacgggccgctttccacaatgcagttgctgtagtcatctacaataataaatccaaagaggagccagttaccatgactcatccaggcactggagatattattgctgtcatgataacagaattgaggggtaaggatattttgagttatctggagaaaaacatctctgtacaaatgacaatagctgttggaactcgaatgccaccgaagaacttcagccgtggctctctagtcttcgtgtcaatatcctttattgttttgatgattatttcttcagcatggctcatattctacttcattcagaagatcaggtacacaaatgcacgcgacaggaaccagcgtcgtctcggagatgcagccaagaaagccatcagtaaattgacaaccaggacagtaaagaagggtgacaaggaaactgacccagactttgatcattgtgcagtctgcatagagagctataagcagaatgatgtcgtccgaattctcccctgcaagcatgttttccacaaatcctgcgtggatccctggcttagtgaacattgtacctgtcctatgtgcaaacttaatatattgaaggccctgggaattgtgccgaatttgccatgtactgataacgtagcattcgatatggaaaggctcaccagaacccaagctgttaaccgaagatcagccctcggcgacctcgccggcgacaactcccttggccttgagccacttcgaacttcggggatctcacctcttcctcaggatggggagctcactccgagaacaggagaaatcaacattgcagtaacaaaagaatggtttattattgccagttttggcctcctcagtgccctcacactctgctacatgatcatcagagccacagctagcttgaatgctaatgaggtagaatggttttgaagaagaaaaaacctgctttctgactgattttgccttgaaggaaaaaagaacctatttttgtgcatcatttaccaatcatgccacacaagcatttatttttagtacattttattttttcataaaattgctaatgccaaagctttgtattaaaagaaataaataataaaataaa

SEQ ID NO: 1977 - DNA, 919 bp, Artificial
  cDNA Sequence
cgccccgcctctaggcgccggccccggagcccggtccgcgagcagcggcggctgccggagggacgatgagctgcgcggggcgggcgggccctgcccggctcgccgcgctcgccctgctgacctgcagcctgtggccggcacgggcagacaacgcgagccaggagtactacacggcgctcatcaacgtgacggtgcaggagcccggccgcggcgccccgctcacgtttcgcatcgaccgcgggcgctacgggcttgactcccccaaggccgaggtccgcggccaggtgctggcgccgctgcccctccacggagttgctgatcatctgggctgtgatccacaaacccggttctttgtccctcctaatatcaaacagtggattgccttgctgcagaggggaaactgcacgtttaaagagaaaatatcacgggccgctttccacaatgcagttgctgtagtcatctacaataataaatccaaagaggagccagttaccatgactcatccaggcactggagatattattgctgtcatgataacagaattgaggggtaaggatattttgagttatctggagaaaaacatctctgtacaaatgacaatagctgttggaactcgaatgccaccgaagaacttcagccgtggctctctagtcttcgtgtcaatatcctttattgttttgatgattatttcttcagcatggctcatattctacttcattcagaagatcaggtacacaaatgcacgcgacaggaaccagcgtcgtctcggagatgcagccaagaaagccatcagtaaattgacaaccaggacagtaaagaagggtgacaaggaaactgacccagactttgatcattgtgcagtctgcatagagagctataagcagaatgatgtcgtccgaattctcccctgcaagtatgt

SEQ ID NO: 1978 - DNA, 831 bp, Artificial
  cDNA Sequence
cgccccgcctctaggcgccggccccggagcccggtccgcgagcagcggcggctgccggagggacgatgagctgcgcggggcgggcgggccctgcccggctcgccgcgctcgccctgctgacctgcagcctgtggccggcacgggcagacaacgcgagccaggagtactacacggcgctcatcaacgtgacggtgcaggagcccggccgcggcgccccgctcacgtttcgcatcgaccgcgggcgctacgggcttgactcccccaaggccgaggtccgcggccaggtgctggcgccgctgcccctccacggagttgctgatcatctgggctgtgatccacaaacccggttctttgtccctcctaatatcaaacagtggattgccttgctgcagaggggaaactgcacgtttaaagagaaaatatcacgggccgctttccacaatgcagttgctgtagtcatctacaataataaatccaaagaggagccagttaccatgactcatccaggcactggagatattattgctgtcatgataacagaattgaggggtaaggatattttgagttatctggagaaaaacatctctgtacaaatgacaatagctgttggaactcgaatgccaccgaagaacttcagccgtggctctctagtcttcgtgtcaatatcctttattgttttgatgattatttcttcagcatggctcatattctacttcattcagaagatcaggtacacaaatgcacgcgacaggaaccagcgtcgtctcggagatgcagccaagaaagccatcagtaaattgacaaccaggacagtaaagaagggtgacaagg

SEQ ID NO: 1979 - DNA, 993 bp, Artificial
  cDNA Sequence
caggcactggagatattattgctgtcatgataacagaattgaggggtaaggatattttgagttatctggagaaaaacatctctgtacaaatgacaatagctgttggaactcgaatgccaccgaagaacttcagccgtggctctctagtcttcgtgtcaatatcctttattgttttgatgattatttcttcagcatggctcatattctacttcattcagaagatcaggtacacaaatgcacgcgacaggaaccagcgtcgtctcggagatgcagccaagaaagccatcagtaaattgacaaccaggacagtaaagaagggtgacaaggaaactgacccagactttgatcattgtgcagtctgcatagagagctataagcagaatgatgtcgtccgaattctcccctgcaagcatgttttccacaaatcctgcgtggatccctggcttagtgaacattgtacctgtcctatgtgcaaacttaatatattgaaggccctgggaattgtgccgaatttgccatgtactgataacgtagcattcgatatggaaaggctcaccagaacccaagctgttaaccgaagatcagccctcggcgacctcgccggcgacaactcccttggccttgagccacttcgaacttcggggatctcacctcttcctcaggatggggagctcactccgagaacaggagaaatcaacattgcagtaacaaaagaatggtttattattgccagttttggcctcctcagtgccctcacactctgctacatgatcatcagagccacagctagcttgaatgctaatgaggtagaatggttttgaagaagaaaaaacctgctttctgactgattttgccttgaaggaaaaaagaacctatttttgtgcatcatttaccaatcatgccacacaagcatttatttttagtacattttattttttcataaaattgctaatgccaaagctttgtattaaaagaaataaataataaaataaa

SEQ ID NO: 1980 - DNA, 668 bp, Artificial
  cDNA Sequence
ggaaactgacccagactttgatcattgtgcagtctgcatagagagctataagcagaatgatgtcgtccgaattctcccctgcaagcatgttttccacaaatcctgcgtggatccctggcttagtgaacattgtacctgtcctatgtgcaaacttaatatattgaaggccctgggaattgtgccgaatttgccatgtactgataacgtagcattcgatatggaaaggctcaccagaacccaagctgttaaccgaagatcagccctcggcgacctcgccggcgacaactcccttggccttgagccacttcgaacttcggggatctcacctcttcctcaggatggggagctcactccgagaacaggagaaatcaacattgcagtaacaaaagaatggtttattattgccagttttggcctcctcagtgccctcacactctgctacatgatcatcagagccacagctagcttgaatgctaatgaggtagaatggttttgaagaagaaaaaacctgctttctgactgattttgccttgaaggaaaaaagaacctatttttgtgcatcatttaccaatcatgccacacaagcatttatttttagtacattttattttttcataaaattgctaatgccaaagctttgtattaaaagaaataaataataaaataaa

SEQ ID NO: 1981 - DNA, 469 bp, Artificial
  cDNA Sequence
gtggatccctggcttagtgaacattgtacctgtcctatgtgcaaacttaatatattgaaggccctgggaattgtgccgaatttgccatgtactgataacgtagcattcgatatggaaaggctcaccagaacccaagctgttaaccgaagatcagccctcggcgacctcgccggcgacaactcccttggccttgagccacttcgaacttcggggatctcacctcttcctcaggatggggagctcactccgagaacaggagaaatcaacattgcagtaacaaggtagaatggttttgaagaagaaaaaacctgctttctgactgattttgccttgaaggaaaaaagaacctatttttgtgcatcatttaccaatcatgccacacaagcatttatttttagtacattttattttttcataaaattgctaatgccaaagctttgtattaaaagaaataaataataaaataaaa

SEQ ID NO: 1982 - DNA, 1567 bp, Artificial
  cDNA Sequence
cgtctcgcgggcctcggcccggtgcgagcggctccgcgatgtggctgagcccggaggaggtgctggtggccaatgcgctgtgggtgacggagcgggccaaccccttcttcgtgctgcagcgacgccggggccacggcaggggcggcggccttacgggtcttctcgtgggcaccctggacgtggtgctggactccagtgcccgcgtggccccttaccgcatcctgcaccagacccaggactcccaggtctactggacagtggcgtgtggttcttcccgcaaagagatcacaaaacactgggaatggctggaaaataacttgctccagacactgtccatcttcgacagtgaggaagatatcaccaccttcgtcaagggcaagatacacggaatcatcgcagaagagaacaagaacctgcagccccagggagacgaggaccccgggaagttcaaggaggctgagctgaagatgcggaagcagtttgggatgcctgagggcgagaagctggtgaattactactcctgcagctactggaagggccgcgtgccccggcagggctggctgtacctgacggtcaaccacctgtgcttctactccttcctgctggggaaggaagtgagcctcgtggtgcagtgggtggacataacgcgtctggagaagaacgccaccctgctcttccccgagagcatccgtgtggacacccgcgaccaggagctcttcttctccatgttcctcaacatcggcgagaccttcaagctcatggagcagttggccaacctggccatgcggcagctgctggacagcgagggcttcctggaggacaaggccctgcctaggcccatccggccacacaggaacatctcagccctgaagcgagacctggacgcccgagccaagaatgagtgctaccgagccacgttccggctgcccagggatgagcggctagacggccacacaagctgcaccctgtggacgccgttcaacaagctgcacatccctggccagatgttcatctccaacaactacatctgcttcgccagcaaggaggaggacgcttgccacctcatcatacccctgagggaggtgaccattgtcgaaaaagctgacagctccagcgtgctgcccagccccctgtccatcagcaccaaaagcaaaatgacattcctgtttgccaacctgaaagaccgtgatttcttggtgcagaggatctctgacttcctccagaaaacaccatccaagcagccaggcagtatcgggagcaggaaagccagtgttgtggaccctagcacagagtcttccccagctcctcaggaggggtcggagcagcccgccagcccagcctctcccctcagcagccgccagagcttctgtgcgcaggaggcgccaaccgcatcccagggcctgctgaagctcttccagaaaaactcgcccatggaggaccttggagccaagggggccaaggagaagatgaaagaggagtcatggcacatccacttcttcgagtacgggcgtggcgtgtgcatgtaccgcacagccaagacgcgggcactggtcctgaagggtatccc

SEQ ID NO: 1983 - DNA, 1404 bp, Artificial
  cDNA Sequence
cgtctcgcgggcctcggcccggtgcgagcggctccgcgatgtggctgagcccggaggaggtgctggtggccaatgcgctgtgggtgacggagcgggccaaccccttcttcgtgctgcagcgacgccggggccacggcaggggcggcggccttacgggtcttctcgtgggcaccctggacgtggtgctggactccagtgcccgcgtggccccttaccgcatcctgcaccagacccaggactcccaggtctactggacagtggcgtgtggttcttcccgcaaagagatcacaaaacactgggaatggctggaaaataacttgctccagacactgtccatcttcgacagtgaggaagatatcaccaccttcgtcaagggcaagatacacggaatcatcgcagaagagaacaagaacctgcagccccagggagacgaggaccccgggaagttcaaggaggctgagctgaagatgcggaagcagtttgggatgcctgagggcgagaagctggtgaattactactcctgcagctactggaagggccgcgtgccccggcagggctggctgtacctgacggtcaaccacctgtgcttctactccttcctgctggggaaggaagtgagcctcgtggtgcagtgggtggacataacgcgtctggagaagaacgccaccctgctcttccccgagagcatccgtgtggacacccgcgaccaggagctcttcttctccatgttcctcaacatcggcgagaccttcaagctcatggagcagttggccaacctggccatgcggcagctgctggacagcgagggcttcctggaggacaaggccctgcctaggcccatccggccacacaggaacatctcagccctgaagcgagacctggacgcccgagccaagaatgagtgctaccgagccacgttccggctgcccagggatgagcggctagacggccacacaagctgcaccctgtggacgccgttcaacaagctgcacatccctggccagatgttcatctccaacaactacatctgcttcgccagcaaggaggaggacgcttgccacctcatcatacccctgagggaggtgaccattgtcgaaaaagctgacagctccagcgtgctgcccagccccctgtccatcagcaccaaaagcaaaatgacattcctgtttgccaacctgaaagaccgtgatttcttggtgcagaggatctctgacttcctccagaaaacaccatccaagcagccaggcagtatcgggagcaggaaagccagtgttgtggaccctagcacagagctcctcaggaggggtcggagcagcccgccagcccagcctctcccctcagcagccgccagagcttctgtgcgcaggaggcgccaaccgcatcccagggcctgctgaagctctt

SEQ ID NO: 1984 - DNA, 860 bp, Artificial
  cDNA Sequence
tctccccaggggcctggaatgagatggtgactcaccccgggtactatgctgagctggtggagaagtccaccgggaagtacagcctggccacagaggagatcgagcgagacctgcaccgctccatgcccgagcaccctgccttccagaacgagctggggattgctgccctccggcgggtgctgactgcctatgccttccgaaaccccaccatcggctactgccaggcaatgaacatcgtgacctcggtgctcctgctctatggcagtgaggaggaggccttctggctcctggtggccctgtgcgagcgcatgctgcccgactactacaacaccagggtggtgggagccctggtggaccaaggcatcttcgaagagctcacgagagacttcctgccgcagctctcggagaagatgcaggacctgggggtgatctccagcatctcgctgtcctggttcctgaccctcttcctcagcgtcatgcccttcgagagcgccgtggtcatcgtcgactgctttttctatgagggcatcaaggtgatcctgcaggtggccctggccgtcctggacgccaacatggagcagctgctgggctgcagcgacgagggcgaggccatgaccatgctgggcagatacctggataatgtggtcaacaagcagagtgtctctcctcctatcccgcacctccgtgccttgctgagcagcagcgatgacccccctgcagaggtggacatctttgagctcctgaaagtgtcctatgagaaattcagcagcctgagggccgaagacattgagcagatgcggtttaaacagaggctgaaagtgatccagtccttggaggacacggccaagaggagtgtggta

SEQ ID NO: 1985 - DNA, 663 bp, Artificial
  cDNA Sequence
gctctgagcccagaggaagccgagtcagccctggaggcggcccattatttcacagaggacagctcctcagaagaagcactaccacaggaagagcaagaaggaagtggaagtgaggagagaggagaggagaaggggaccagctctccggactatcggcactaccttcgaatgtgggccaaggagaaagaggctcagaaggagacgattaaggatcttcccaagatgaaccaggagcagttcattgagctgtgcaagacgctttacaacatgttcagtgaagaccccatggagcaggacctgtaccacgccatcgccaccgtggccagcctcctgctccgcatcggagaggtggggaagaagttctcagcccgcacaggcaggaagcccagggactgtgccactgaggaggacgagccaccagcacccgaactgcatcaggacgcagccagggagcttcagcccccagctgcaggagacccccaagccaaagcaggcggagacacacacctcggaaaagccccacaggagagccaggtggtggtggaggggggcagcggcgagggacagggctcaccctcccagctgctgtctgacgatgaaaccaaagacgacatgtccatgtcctcctactcggtggtcagcacgggctccctgcaatgtgaa

SEQ ID NO: 1986 - DNA, 739 bp, Artificial
  cDNA Sequence
agaagcactaccacaggaagagcaagaaggaagtggaagtgaggagagaggagaggagaaggggaccagctctccggactatcggcactaccttcgaatgtgggccaaggagaaagaggctcagaaggagacgattaaggatcttcccaagatgaaccaggagcagttcattgagctgtgcaagacgctttacaacatgttcagtgaagaccccatggagcaggacctgtaccacgccatcgccaccgtggccagcctcctgctccgcatcggagaggtggggaagaagttctcagcccgcacaggcaggaagcccagggactgtgccactgaggaggacgagccaccagcacccgaactgcatcaggacgcagccagggagcttcagcccccagctgcaggagacccccaagccaaagcaggcggagacacacacctcggaaaagccccacaggagagccaggtggtggtggaggggggcagcggcgagggacagggctcaccctcccagctgctgtctgacgatgaaaccaaagacgacatgtccatgtcctcctactcggtggtcagcacgggctccctgcaatgtgaagaccttgcagacgacacggtgctggtgggcggggaggcctgcagccccacagcgcgcatcggcggcaccgtcgacaccgactggtgcatctcctttgagcagatcctggcctccatcctgacggagtccgtgctggtgaacttcttt

SEQ ID NO: 1987 - DNA, 738 bp, Artificial
  cDNA Sequence
gtctcacatgacaaagattaatctctttcctcctaacctgcagaggagaaggggaccagctctccggactatcggcactaccttcgaatgtgggccaaggagaaagaggctcagaaggagacgattaaggatcttcccaagatgaaccaggagcagttcattgagctgtgcaagacgctttacaacatgttcagtgaagaccccatggagcaggacctgtaccacgccatcgccaccgtggccagcctcctgctccgcatcggagaggtggggaagaagttctcagcccgcacaggcaggaagcccagggactgtgccactgaggaggacgagccaccagcacccgaactgcatcaggacgcagccagggagcttcagcccccagctgcaggagacccccaagccaaagcaggcggagacacacacctcggaaaagccccacaggagagccaggtggtggtggaggggggcagcggcgagggacagggctcaccctcccagctgctgtctgacgatgaaaccaaagacgacatgtccatgtcctcctactcggtggtcagcacgggctccctgcaatgtgaagaccttgcagacgacacggtgctggtgggcggggaggcctgcagccccacagcgcgcatcggcggcaccgtcgacaccgactggtgcatctcctttgagcagatcctggcctccatcctgacggagtccgtgctggtgaacttctttgagaagaga

SEQ ID NO: 1988 - DNA, 1132 bp, Artificial
  cDNA Sequence
cgttctcgggtgctacgctgctgcagctgccgcctcttccaggcgcaccaggtaaaaaagagtgtcaagtggacatgcaaagcttgtggagagaagcagtcctttttgcaggcttatggtgaaggctctggtgctgattgtagacgccatgtccaaaagttaaatctactacagggacaagtttcagagctgccactcaggtctctagaagaaactgtcagtgccagtgaagaagaaaacgtgggacaccagcaggctgggaatgtgaagcagcaggaaaaatcgcagccctcagagagtcgctggctgaagtatctagaaaaggactcccaagaactggagctggaaggaacaggagtgtgtttcagcaaacagccttcatccaaaatggaggagccaggcccccgcttcagtcaagacctgcctagaaaaaggaagtggagcaggagcaccgtccagcctccgtgcagccgtggcgtgcaggactcgggtggctctgaggtcgcctggggaccccagaagggacaggctggcctgacatggaaggtgaaacaaggcagcagcccctgcctccaggagaactctgcagactgcagtgccggggagctgaggggtcctgggaaggagctatggagtcccatccagcaggttacagccacatcctctaaatgggcgcaatttgtcctgccacctagaaaaagttcacatgtggacagtgagcagccaaggtctcttcagagggaccccaggccagctggtccagcacaggctaagcaagggacccccagagcacaggcctcaagagaaggcctcagcaggcccactgccgctgtccagcttcctcgggccacacaccccgtcacatctgggtctgagaggccttgcgggaagacctcatgggacgcaaggactccctgggcagagggtgggcccctggtcctggaggcacagaatcctcgacccacacgactatgtgacctctttataactggggaagacttcgatgatgatgtgtgatctgggactggcaggttattaatcgagatacacttgttaggagggacagggttcccctaaggcacttttaaagatactctgtaagaaccattaacaataaacttactgtcaatca

SEQ ID NO: 1989 - DNA, 854 bp, Artificial
  cDNA Sequence
ttggttaaagtgctgatgccatttaattagattgtttacaaatttaacaggatggctacaaagagatcttattttaaaagcagctgatggtttggaaatgagagaactacagtggtgaagagaccaggaggcagctctcagtgaaaccaacattgcggatgcccttcgtgagccttctcagtcccagcaggaagcccacaacactggcctccccagcctgcctgctgacaacacctaggcttactttatctaaaatcagagtgtaccaggtctgtagcagaaaataatcaactaaatgtcagggacctatgagtcatttaaaacaaaagagaaagtgaaagccattaggcaagctatgtgctgggctgctaacgtagcccctgcagggaggggtcaggagcgcgctgcagtgagccttgggtctcgcaggcccagccctgctgcaaggagccagggcacccaggaaacatcagcacacacacacacagggaccctcccttcatgtcacttgttttgctgccctaaatggcttcttgcaccctaacccctgatcctggaagaaggcagagaaactggcccgtacagagacctgcaattctacgcaagcttaacacaactatgagacagaagaggggcacgcagaagaggtgggcaaaagtggtcacaacggcgggggatgctttgaatactggatggtgtccagagccgctccgatgtcatagttcttggtctgcaggagcctggtgagccagccgccttcatcagagaagcccatggacagcatctgggagagggactcaatcagccgcgggtcagcctctgccgaaacaatgtgggtacaaggcagcttcctt

SEQ ID NO: 1990 - DNA, 2075 bp, Artificial
  cDNA Sequence
gcggctctcgccgcccagcccagcccagcccggcccggcccggccctgccgcggaggcgaggccgccagtgtcccgcgcccctgatatctgcagtgagcctgatacctgcctctgcccttctgagcctgttcctcttccctgagtacagggcacaaagcttgcgccctgaggggcggccggcgcgctccctggcccggtccccgcccggccccgggccccccgcccctccccgacccggggccggggcccctgccgccgccgccgccgccttccgacccctgcgccccggccccggtcccccgggccatgcagcctcggccccgcgggcgcccgccgcgcacccgaggagatgaggctccgcaatggcaccttcctgacgctgctgctcttctgcctgtgcgccttcctctcgctgtcctggtacgcggcactcagcggccagaaaggcgacgttgtggacgtttaccagcgggagttcctggcgctgcgcgatcggttgcacgcagctgagcaggagagcctcaagcgctccaaggagctcaacctggtgctggacgagatcaagagggccgtgtcagaaaggcaggcgctgcgagacggagacggcaatcgcacctggggccgcctaacagaggacccccgattgaagccgtggaacggctcacaccggcacgtgctgcacctgcccaccgtcttccatcacctgccacacctgctggccaaggagagcagtctgcagcccgcggtgcgcgtgggccagggccgcaccggagtgtcggtggtgatgggcatcccgagcgtgcggcgcgaggtgcactcgtacctgactgacactctgcactcgctcatctccgagctgagcccgcaggagaaggaggactcggtcatcgtggtgctgatcgccgaggcgaactgactcacagtacacttcggcagtgacagagaacatcaaggccttgttccccacggagatccattctgggctcctggaggtcatctcaccctccccccacttctaccctgacttctcccgcctccgagagtcctttggggaccccaaggagagagtcaggtggaggaccaaacagaacctcgattactgcttcctcatgatgtacgcgcagtccaaaggcatctactacgtgcagctggaggatgacatcgtggccaagcccaactacctgagcaccatgaagaactttgcactgcagcagccttcagaggactggatgatcctggagttctcccagctgggcttcattggtaagatgttcaagtcgctggacctgagcctgattgtagagttcattctcatgttctaccgggacaagcccatcgactggctcctggaccatattctgtgggtgaaagtctgcaaccccgagaaggatgcgaagcactgtgaccggcagaaagccaacctgcggatccgcttcaaaccgtccctcttccagcacgtgggcactcactcctcgctggctggcaagatccagaaactgaaggacaaagactttggaaagcaggcgctgcggaaggagcatgtgaacccgccagcagaggtgagcacgagcctgaagacataccagcacttcaccctggagaaagcctacctgcgcgaggacttcttctgggccttcacccctgccgcgggggacttcatccgcttccgcttcttccaacctctaagactggagcggttcttcttccgcagtgggaacatcgagcacccggaggacaagctcttcaacacgtctgtggaggtgctgcccttcgacaaccctcagtcagacaaggaggccctgcaggagggccgcaccgccaccctccggtaccctcggagccccgacggctacctccagatcggctccttctacaagggagtggcagagggagaggtggacccagccttcggccctctggaagcactgcgcctctcgatccagacggactcccctgtgtgggtgattctgagcgagatcttcctgaaaaaggccgactaagctgcgggcttctgagggtaccctgtggccagccctgaagcccacatttctgggggtgtcgtcactgccgtccc

SEQ ID NO: 1991 - DNA, 1578 bp, Artificial
  cDNA Sequence
gcggctctcgccgcccagcccagcccagcccggcccggcccggccctgccgcggaggcgaggccgccagtgtcccgcgcccctgatatctgcagtgagcctgatacctgcctctgcccttctgagcctgttcctcttccctgagtacagggcacaaagcttgcgccctgaggggcggccggcgcgctccctggcccggtccccgcccggccccgggccccccgcccctccccgacccggggccggggcccctgccgccgccgccgccgccttccgacccctgcgccccggccccggtcccccgggccatgcagcctcggccccgcgggcgcccgccgcgcacccgaggagatgaggctccgcaatggcaccttcctgacgctgctgctcttctgcctgtgcgccttcctctcgctgtcctggtacgcggcactcagcggccagaaaggcgacgttgtggacgtttaccagcgggagttcctggcgctgcgcgatcggttgcacgcagctgagcaggagagcctcaagcgctccaaggagctcaacctggtgctggacgagatcaagagggccgtgtcagaaaggcaggcgctgcgagacggagacggcaatcgcacctggggccgcctaacagaggacccccgattgaagccgtggaacggctcacaccggcacgtgctgcacctgcccaccgtcttccatcacctgccacacctgctggccaaggagagcagtctgcagcccgcggtgcgcgtgggccagggccgcaccggagtgtcggtggtgatgggcatcccgagcgtgcggcgcgaggtgcactcgtacctgactgacactctgcactcgctcatctccgagctgagcccgcaggagaaggaggactcggtcatcgtggtgctgatcgccgaggcgaactgactcacagtacacttcggcagtgacagagaacatcaaggccttgttccccacggagatccattctgggctcctggaggtcatctcaccctccccccacttctaccctgacttctcccgcctccgagagtcctttggggaccccaaggagagagtcaggtggaggaccaaacagaacctcgattactgcttcctcatgatgtacgcgcagtccaaaggcatctactacgtgcagctggaggatgacatcgtggccaagcccaactacctgagcaccatgaagaactttgcactgcagcagccttcagaggactggatgatcctggagttctcccagctgggcttcattgcacgtgggcactcactcctcgctggctggcaagatccagaaactgaaggacaaagactttggaaagcaggcgctgcggaaggagcatgtgaacccgccagcagagtgggaacatcgagcacccggaggacaagctcttcaacacgtctgtggaggtgctgcccttcgacaaccctcagtcagacaaggaggccctgcaggagggccgcaccgccaccctccggtaccctcggagccccgacggctacctccagatcggctccttctacaagggagtggcagagggagaggtggacccagccttcggccctctgg

SEQ ID NO: 1992 - DNA, 1578 bp, Artificial; identical to SEQ ID NO: 1991
  cDNA Sequence

SEQ ID NO: 1993 - DNA, 1523 bp, Artificial
  cDNA Sequence
gcggctctcgccgcccagcccagcccagcccggcccggcccggccctgccgcggaggcgaggccgccagtgtcccgcgcccctgatatctgcagtgagcctgatacctgcctctgcccttctgagcctgttcctcttccctgagtacagggcacaaagcttgcgccctgaggggcggccggcgcgctccctggcccggtccccgcccggccccgggccccccgcccctccccgacccggggccggggcccctgccgccgccgccgccgccttccgacccctgcgccccggccccggtcccccgggccatgcagcctcggccccgcgggcgcccgccgcgcacccgaggagatgaggctccgcaatggcaccttcctgacgctgctgctcttctgcctgtgcgccttcctctcgctgtcctggtacgcggcactcagcggccagaaaggcgacgttgtggacgtttaccagcgggagttcctggcgctgcgcgatcggttgcacgcagctgagcaggagagcctcaagcgctccaaggagctcaacctggtgctggacgagatcaagagggccgtgtcagaaaggcaggcgctgcgagacggagacggcaatcgcacctggggccgcctaacagaggacccccgattgaagccgtggaacggctcacaccggcacgtgctgcacctgcccaccgtcttccatcacctgccacacctgctggccaaggagagcagtctgcagcccgcggtgcgcgtgggccagggccgcaccggagtgtcggtggtgatgggcatcccgagcgtgcggcgcgaggtgcactcgtacctgactgacactctgcactcgctcatctccgagctgagcccgcaggagaaggaggactcggtcatcgtggtgctgatcgccgaggcgaactgactcacagtacacttcggcagtgacagagaacatcaaggccttgttccccacggagatccattctgggctcctggaggtcatctcaccctccccccacttctaccctgacttctcccgcctccgagagtcctttggggaccccaaggagagagtcaggtggaggaccaaacagaacctcgattactgcttcctcatgatgtacgcgcagtccaaaggcatctactacgtgcagctggaggatgacatcgtggccaagcccaactacctgagcaccatgaagaactttgcactgcagcagccttcagaggactggatgatcctggagttctcccagctgggcttcattgcacgtgggcactcactcctcgctggctggcaagatccagaaactgaaggacaaagactttggaaagcaggcgctgcggaaggagcatgtgaacccgccagcagagtgggaacatcgagcacccggaggacaagctcttcaacacgtctgtggaggtgctgcccttcgacaaccctcagtcagacaaggaggccctgcaggagggccgcaccgccaccctccggtaccctcggagccccgacggctacctccagatcggt

SEQ ID NO: 1994 - DNA, 916 bp, Artificial
  cDNA Sequence
gcggctctcgccgcccagcccagcccagcccggcccggcccggccctgccgcggaggcgaggccgccagtgtcccgcgcccctgatatctgcagtgagcctgatacctgcctctgcccttctgagcctgttcctcttccctgagtacagggcacaaagcttgcgccctgaggggcggccggcgcgctccctggcccggtccccgcccggccccgggccccccgcccctccccgacccggggccggggcccctgccgccgccgccgccgccttccgacccctgcgccccggccccggtcccccgggccatgcagcctcggccccgcgggcgcccgccgcgcacccgaggagatgaggctccgcaatggcaccttcctgacgctgctgctcttctgcctgtgcgccttcctctcgctgtcctggtacgcggcactcagcggccagaaaggcgacgttgtggacgtttaccagcgggagttcctggcgctgcgcgatcggttgcacgcagctgagcaggagagcctcaagcgctccaaggagctcaacctggtgctggacgagatcaagagggccgtgtcagaaaggcaggcgctgcgagacggagacggcaatcgcacctggggccgcctaacagaggacccccgattgaagccgtggaacggctcacaccggcacgtgctgcacctgcccaccgtcttccatcacctgccacacctgctggccaaggagagcagtctgcagcccgcggtgcgcgtgggccagggccgcaccggagtgtcggtggtgatgggcatcccgagcgtgcggcgcgaggtgcactcgtacctgactgacactctgcactcgctcatctccgagctgagcccgcaggagaaggaggactcggtcatcgtggtgctgatcgccgaggcgagtga

SEQ ID NO: 1995 - DNA, 1303 bp, Artificial
  cDNA Sequence
gtttgctgctggagccgcggcgttctcctcgggcccgggccgcgcccgtgggtgctccggaccggactccgcgggcgcagctgtcccgacgctgagctggggacccgtggggttctcggagaggggcagagacccaaggtcacagaggcgacgttgtggacgtttaccagcgggagttcctggcgctgcgcgatcggttgcacgcagctgagcaggagagcctcaagcgctccaaggagctcaacctggtgctggacgagatcaagagggccgtgtcagaaaggcaggcgctgcgagacggagacggcaatcgcacctggggccgcctaacagtcccgatccttcccgacccacccagaggacccccgattgaagccgtggaacggctcacaccggcacgtgctgcacctgcccaccgtcttccatcacctgccacacctgctggccaaggagagcagtctgcagcccgcggtgcgcgtgggccagggccgcaccggagtgtcggtggtgatgggcatcccgagcgtgcggcgcgaggtgcactcgtacctgactgacactctgcactcgctcatctccgagctgagcccgcaggagaaggaggactcggtcatcgtggtgctgatcgccgaggcgaactgactcacagtacacttcggcagtgacagagaacatcaaggccttgttccccacggagatccattctgggctcctggaggtcatctcaccctccccccacttctaccctgacttctcccgcctccgagagtcctttggggaccccaaggagagagtcaggtggaggaccaaacagaacctcgattactgcttcctcatgatgtacgcgcagtccaaaggcatctactacgtgcagctggaggatgacatcgtggccaagcccaactacctgagcaccatgaagaactttgcactgcagcagccttcagaggactggatgatcctggagttctcccagctgggcttcattgcacgtgggcactcactcctcgctggctggcaagatccagaaactgaaggacaaagactttggaaagcaggcgctgcggaaggagcatgtgaacccgccagcagagtgggaacatcgagcacccggaggacaagctcttcaacacgtctgtggaggtgctgcccttcgacaaccctcagtcagacaaggaggccctgcaggagggccgcaccgccaccctccggtaccctcggagccccgacggctacctccagatcggctccttctacaagggagtggcagagggagaggtggacccagccttcggccctctgg

SEQ ID NO: 1996 - DNA, 1305 bp, Artificial
  cDNA Sequence
atagtgtcggtggtgatgggcatcccgagcgtgcggcgcgaggtgcactcgtacctgactgacactctgcactcgctcatctccgagctgagcccgcaggagaaggaggactcggtcatcgtggtgctgatcgccgaggcgaactgactcacagtacacttcggcagtgacagagaacatcaaggccttgttccccacggagatccattctgggctcctggaggtcatctcaccctccccccacttctaccctgacttctcccgcctccgagagtcctttggggaccccaaggagagagtcaggtggaggaccaaacagaacctcgattactgcttcctcatgatgtacgcgcagtccaaaggcatctactacgtgcagctggaggatgacatcgtggccaagcccaactacctgagcaccatgaagaactttgcactgcagcagccttcagaggactggatgatcctggagttctcccagctgggcttcattggtaagatgttcaagtcgctggacctgagcctgattgtagagttcattctcatgttctaccgggacaagcccatcgactggctcctggaccatattctgtgggtgaaagtctgcaaccccgagaaggatgcgaagcactgtgaccggcagaaagccaacctgcggatccgcttcaaaccgtccctcttccagcacgtgggcactcactcctcgctggctggcaagatccagaaactgaaggacaaagactttggaaagcaggcgctgcggaaggagcatgtgaacccgccagcagaggtgagcacgagcctgaagacataccagcacttcaccctggagaaagcctacctgcgcgaggacttcttctgggccttcacccctgccgcgggggacttcatccgcttccgcttcttccaacctctaagactggagcggttcttcttccgcagtgggaacatcgagcacccggaggacaagctcttcaacacgtctgtggaggtgctgcccttcgacaaccctcagtcagacaaggaggccctgcaggagggccgcaccgccaccctccggtaccctcggagccccgacggctacctccagatcggctccttctacaagggagtggcagagggagaggtggacccagccttcggccctctggaagcactgcgcctctcgatccagacggactcccctgtgtgggtgattctgagcgagatcttcctgaaaaaggccgactaagctgcgggcttctgagggtaccctgtggccagccctgaagcccacatttctgggggtgtcgtcactgccgtccc

SEQ ID NO: 1997 - DNA, 1305 bp, Artificial; identical to SEQ ID NO: 1996
  cDNA Sequence

SEQ ID NO: 1998 - DNA, 1006 bp, Artificial
  cDNA Sequence
atagtgtcggtggtgatgggcatcccgagcgtgcggcgcgaggtgcactcgtacctgactgacactctgcactcgctcatctccgagctgagcccgcaggagaaggaggactcggtcatcgtggtgctgatcgccgaggcgaactgactcacagtacacttcggcagtgacagagaacatcaaggccttgttccccacggagatccattctgggctcctggaggtcatctcaccctccccccacttctaccctgacttctcccgcctccgagagtcctttggggaccccaaggagagagtcaggtggaggaccaaacagaacctcgattactgcttcctcatgatgtacgcgcagtccaaaggcatctactacgtgcagctggaggatgacatcgtggccaagcccaactacctgagcaccatgaagaactttgcactgcagcagccttcagaggactggatgatcctggagttctcccagctgggcttcattggtaagatgttcaagtcgctggacctgagcctgattgtagagttcattctcatgttctaccgggacaagcccatcgactggctcctggaccatattctgtgggtgaaagtctgcaaccccgagaaggatgcgaagcactgtgaccggcagaaagccaacctgcggatccgcttcaaaccgtccctcttccagcacgtgggcactcactcctcgctggctggcaagatccagaaactgaaggacaaagactttggaaagcaggcgctgcggaaggagcatgtgaacccgccagcagagtgggaacatcgagcacccggaggacaagctcttcaacacgtctgtggaggtgctgcccttcgacaaccctcagtcagacaaggaggccctgcaggagggccgcaccgccaccctccggtaccctcggagccccgacggctacctccagatcggctccttctacaagggagtggcagagggagaggtggacccagccttcggccctctggaagcact

SEQ ID NO: 1999 - DNA, 808 bp, Artificial
  cDNA Sequence
atagtgtcggtggtgatgggcatcccgagcgtgcggcgcgaggtgcactcgtacctgactgacactctgcactcgctcatctccgagctgagcccgcaggagaaggaggactcggtcatcgtggtgctgatcgccgaggcgaactgactcacagtacacttcggcagtgacagagaacatcaaggccttgttccccacggagatccattctgggctcctggaggtcatctcaccctccccccacttctaccctgacttctcccgcctccgagagtcctttggggaccccaaggagagagtcaggtggaggaccaaacagaacctcgattactgcttcctcatgatgtacgcgcagtccaaaggcatctactacgtgcagctggaggatgacatcgtggccaagcccaactacctgagcaccatgaagaactttgcactgcagcagccttcagaggactggatgatcctggagttctcccagctgggcttcattgcacgtgggcactcactcctcgctggctggcaagatccagaaactgaaggacaaagactttggaaagcaggcgctgcggaaggagcatgtgaacccgccagcagagtgggaacatcgagcacccggaggacaagctcttcaacacgtctgtggaggtgctgcccttcgacaaccctcagtcagacaaggaggccctgcaggagggccgcaccgccaccctccggtaccctcggagccccgacggctacctccagatcggctccttctacaagggagtggcagagggagaggtggacccagccttcggccctctgg

SEQ ID NO: 2000 - DNA, 753 bp, Artificial
  cDNA Sequence
atagtgtcggtggtgatgggcatcccgagcgtgcggcgcgaggtgcactcgtacctgactgacactctgcactcgctcatctccgagctgagcccgcaggagaaggaggactcggtcatcgtggtgctgatcgccgaggcgaactgactcacagtacacttcggcagtgacagagaacatcaaggccttgttccccacggagatccattctgggctcctggaggtcatctcaccctccccccacttctaccctgacttctcccgcctccgagagtcctttggggaccccaaggagagagtcaggtggaggaccaaacagaacctcgattactgcttcctcatgatgtacgcgcagtccaaaggcatctactacgtgcagctggaggatgacatcgtggccaagcccaactacctgagcaccatgaagaactttgcactgcagcagccttcagaggactggatgatcctggagttctcccagctgggcttcattgcacgtgggcactcactcctcgctggctggcaagatccagaaactgaaggacaaagactttggaaagcaggcgctgcggaaggagcatgtgaacccgccagcagagtgggaacatcgagcacccggaggacaagctcttcaacacgtctgtggaggtgctgcccttcgacaaccctcagtcagacaaggaggccctgcaggagggccgcaccgccaccctccggtaccctcggagccccgacggctacctccagatcggt

SEQ ID NO: 2001 - DNA, 1165 bp, Artificial
  cDNA Sequence
agactgactcacagtacacttcggcagtgacagagaacatcaaggccttgttccccacggagatccattctgggctcctggaggtcatctcaccctccccccacttctaccctgacttctcccgcctccgagagtcctttggggaccccaaggagagagtcaggtggaggaccaaacagaacctcgattactgcttcctcatgatgtacgcgcagtccaaaggcatctactacgtgcagctggaggatgacatcgtggccaagcccaactacctgagcaccatgaagaactttgcactgcagcagccttcagaggactggatgatcctggagttctcccagctgggcttcattggtaagatgttcaagtcgctggacctgagcctgattgtagagttcattctcatgttctaccgggacaagcccatcgactggctcctggaccatattctgtgggtgaaagtctgcaaccccgagaaggatgcgaagcactgtgaccggcagaaagccaacctgcggatccgcttcaaaccgtccctcttccagcacgtgggcactcactcctcgctggctggcaagatccagaaactgaaggacaaagactttggaaagcaggcgctgcggaaggagcatgtgaacccgccagcagaggtgagcacgagcctgaagacataccagcacttcaccctggagaaagcctacctgcgcgaggacttcttctgggccttcacccctgccgcgggggacttcatccgcttccgcttcttccaacctctaagactggagcggttcttcttccgcagtgggaacatcgagcacccggaggacaagctcttcaacacgtctgtggaggtgctgcccttcgacaaccctcagtcagacaaggaggccctgcaggagggccgcaccgccaccctccggtaccctcggagccccgacggctacctccagatcggctccttctacaagggagtggcagagggagaggtggacccagccttcggccctctggaagcactgcgcctctcgatccagacggactcccctgtgtgggtgattctgagcgagatcttcctgaaaaaggccgactaagctgcgggcttctgagggtaccctgtggccagccctgaagcccacatttctgggggtgtcgtcactgccgtccc

SEQ ID NO: 2002 - DNA, 336 bp, Artificial
  cDNA Sequence
tgaggactaacggggaaacatcctccgagaagatacaatctcaagggtgggcctggatgtgggcttccagagaccatctccctgaaccagatcttggggatgcagcgccccctggctcgccttcatcattctggacatccgggctcccgagacaagagcgcagcacgagtcgccagcgctcccgaggctccccttcgagcacctgcgtgccctacaaggtccacgccctggcaaccttcgagtgctcggctacgagccatgccagccgcctgtggcagacgctgcagcagttttgggccgatcacatctcgcggcccttctcgccacggcggccgc

SEQ ID NO: 2003 - DNA, 2308 bp, Artificial
  cDNA Sequence
tttaggttgcgcaggcgcccgctggccatttcgtcttagccacgcagaagtcgcgtgtctaggtgagtcgcggtgggtcctcgcttgcagttcagcgaccacgtttgtttcgacgccggaccgcgtaagagacgatgatgttgggcacggaaggtggagagggattcgtggtgaaggtccggggcttgccctggtcttgctcggccgatgaagtgcagaggtttttttctgactgcaaaattcaaaatggggctcaaggtattcgtttcatctacaccagagaaggcagaccaagtggcgaggcttttgttgaacttgaatcagaagatgaagtcaaattggccctgaaaaaagacagagaaactatgggacacagatatgttgaagtattcaagtcaaacaacgttgaaatggattgggtgttgaagcatactggtccaaatagtcctgacacggccaatgatggctttgtacggcttagaggacttccctttggatgtagcaaggaagaaattgttcagttcttctcagggttggaaatcgtgccaaatgggataacattgccggtggacttccaggggaggagtacgggggaggccttcgtgcagtttgcttcacaggaaatagctgaaaaggctctaaagaaacacaaggaaagaatagggcacaggtatattgaaatctttaagagcagtagagctgaagttagaactcattatgatccaccacgaaagcttatggccatgcagcggccaggtccttatgacagacctggggctggtagagggtataacagcattggcagaggagctggctttgagaggatgaggcgtggtgcttatggtggaggctatggaggctatgatgattacaatggctataatgatggctatggatttgggtcagatagatttggaagagacctcaattactgtttttcaggaatgtctgatcacagatacggggatggtggctctactttccagagcacaacaggacactgtgtacacatgcggggattaccttacagagctactgagaatgacatttataattttttttcaccgctcaaccctgtgagagtacacattgaaattggtcctgatggcagagtaactggtgaagcagatgtcgagttcgcaactcatgaagatgctgtggcagctatgtcaaaagacaaagcaaatatgcaacacagatatgtagaactcttcttgaattctacagcaggagcaagcggtggtgcttacggtagccaaatgctaggaggcatgggtttgtgtaaatatcactttagtgtcttttttttaagctaaccttgtatgccttttctctcatttcagaacacagatatgtagaactcttcttgaattctacagcaggagcaagcggtggtgcttatggtagccaaatgatgggaggcatgggcttgtcaaaccagtccagctacgggggcccagccagccagcagctgagtgggggttacggaggcggctacggtggccagagcagcatgagtggatacggtaaccaaggagcagtgaacagcagctactacagtagtggaagccgtgcatctatgggcgtgaacggaatgggagggttgtctagcatgtccagtatgagtggtggatggggaatgtaattgatcgatcctgatcactgactcttggtcaaccttttttttttttttttttttttctttaagaaaacttcagtttaacagtttctgcaatacaagcttgtgatttatgcttactctaagtggaaatcaggattgttatgaagacttaaggcccagtatttttgaatacaatactcatctaggatgtaacagtgaagctgagtaaactataactgttaaacttaagttccagcttttctcaagttagttataggatgtacttaagcagtaagcgtatttaggtaaaagcagttgaattatgttaaatgttgccctttgccacgttaaattgaacactgttttggatgcatgttgaaagacatgcttttatttttttgtaaaacaatataggagctgtgtctactattaaaagtgaaacattttggcatgtttgttaattctagtttcatttaataacctgtaaggcacgtaagtttaagctttttttttttttaagttaatgggaaaaatttgagacgcaataccaatacttaggattttggtcttggtgtttgtatgaaattctgaggccttgatttaaatctttcattgtattgtgatttccttttaggtatattgcgctaagtgaaacttgtcaaataaatcctccttttaaaaactgca

SEQ ID NO: 2004 - DNA, 2216 bp, Artificial
  cDNA Sequence
tttaggttgcgcaggcgcccgctggccatttcgtcttagccacgcagaagtcgcgtgtctaggtgagtcgcggtgggtcctcgcttgcagttcagcgaccacgtttgtttcgacgccggaccgcgtaagagacgatgatgttgggcacggaaggtggagagggattcgtggtgaaggtccggggcttgccctggtcttgctcggccgatgaagtgcagaggtttttttctgactgcaaaattcaaaatggggctcaaggtattcgtttcatctacaccagagaaggcagaccaagtggcgaggcttttgttgaacttgaatcagaagatgaagtcaaattggccctgaaaaaagacagagaaactatgggacacagatatgttgaagtattcaagtcaaacaacgttgaaatggattgggtgttgaagcatactggtccaaatagtcctgacacggccaatgatggctttgtacggcttagaggacttccctttggatgtagcaaggaagaaattgttcagttcttctcagggttggaaatcgtgccaaatgggataacattgccggtggacttccaggggaggagtacgggggaggccttcgtgcagtttgcttcacaggaaatagctgaaaaggctctaaagaaacacaaggaaagaatagggcacaggtatattgaaatctttaagagcagtagagctgaagttagaactcattatgatccaccacgaaagcttatggccatgcagcggccaggtccttatgacagacctggggctggtagagggtataacagcattggcagaggagctggctttgagaggatgaggcgtggtgcttatggtggaggctatggaggctatgatgattacaatggctataatgatggctatggatttgggtcagatagatttggaagagacctcaattactgtttttcaggaatgtctgatcacagatacggggatggtggctctactttccagagcacaacaggacactgtgtacacatgcggggattaccttacagagctactgagaatgacatttataattttttttcaccgctcaaccctgtgagagtacacattgaaattggtcctgatggcagagtaactggtgaagcagatgtcgagttcgcaactcatgaagatgctgtggcagctatgtcaaaagacaaagcaaatatgcaacacagatatgtagaactcttcttgaattctacagcaggagcaagcggtggtgcttacgaacacagatatgtagaactcttcttgaattctacagcaggagcaagcggtggtgcttatggtagccaaatgatgggaggcatgggcttgtcaaaccagtccagctacgggggcccagccagccagcagctgagtgggggttacggaggcggctacggtggccagagcagcatgagtggatacggtaaccaaggagcagtgaacagcagctactacagtagtggaagccgtgcatctatgggcgtgaacggaatgggagggttgtctagcatgtccagtatgagtggtggatggggaatgtaattgatcgatcctgatcactgactcttggtcaaccttttttttttttttttttttttctttaagaaaacttcagtttaacagtttctgcaatacaagcttgtgatttatgcttactctaagtggaaatcaggattgttatgaagacttaaggcccagtatttttgaatacaatactcatctaggatgtaacagtgaagctgagtaaactataactgttaaacttaagttccagcttttctcaagttagttataggatgtacttaagcagtaagcgtatttaggtaaaagcagttgaattatgttaaatgttgccctttgccacgttaaattgaacactgttttggatgcatgttgaaagacatgcttttatttttttgtaaaacaatataggagctgtgtctactattaaaagtgaaacattttggcatgtttgttaattctagtttcatttaataacctgtaaggcacgtaagtttaagctttttttttttttaagttaatgggaaaaatttgagacgcaataccaatacttaggattttggtcttggtgtttgtatgaaattctgaggccttgatttaaatctttcattgtattgtgatttccttttaggtatattgcgctaagtgaaacttgtcaaataaatcctccttttaaaaactgca

SEQ ID NO: 2005 - DNA, 1930 bp, Artificial
  cDNA Sequence
tttaggttgcgcaggcgcccgctggccatttcgtcttagccacgcagaagtcgcgtgtctaggtgagtcgcggtgggtcctcgcttgcagttcagcgaccacgtttgtttcgacgccggaccgcgtaagagacgatgatgttgggcacggaaggtggagagggattcgtggtgaaggtccggggcttgccctggtcttgctcggccgatgaagtgcagaggtttttttctgactgcaaaattcaaaatggggctcaaggtattcgtttcatctacaccagagaaggcagaccaagtggcgaggcttttgttgaacttgaatcagaagatgaagtcaaattggccctgaaaaaagacagagaaactatgggacacagatatgttgaagtattcaagtcaaacaacgttgaaatggattgggtgttgaagcatactggtccaaatagtcctgacacggccaatgatggctttgtacggcttagaggacttccctttggatgtagcaaggaagaaattgttcagttcttctcagggttggaaatcgtgccaaatgggataacattgccggtggacttccaggggaggagtacgggggaggccttcgtgcagtttgcttcacaggaaatagctgaaaaggctctaaagaaacacaaggaaagaatagggcacaggtatattgaaatctttaagagcagtagagctgaagttagaactcattatgatccaccacgaaagcttatggccatgcagcggccaggtccttatgacagacctggggctggtagagggtataacagcattggcagaggagctggctttgagaggatgaggcgtggtgcttatggtggaggctatggaggctatgatgattacaatggctataatgatggctatggatttgggtcagatagatttggaagagacctcaattactgtttttcaggaatgtctgatcacagatacggggatggtggctctactttccagagcacaacaggacactgtgtacacatgcggggattaccttacagagctactgagaatgacatttataattttttttcaccgctcaaccctgtgagagtacacattgaaattggtcctgatggcagagtaactggtgaagcagatgtcgagttcgcaactcatgaagatgctgtggcagctatgtcaaaagacaaagcaaatatgcaacacagatatgtagaactcttcttgaattctacagcaggagcaagcggtggtgcttacggtagccaaatgctaggaggcatgggtttgtcaaaccagtccagctacgggggcccagccagccagcagctgagtgggggttacggaggcggctacggtggccagagcagcatgagtggatacgaccaagttttacaggaaaactccagtgattttcaatcaaacattgcataggtaaccaaggagcagtgaacagcagctactacagtagtggaagccgtgcatctatgggcgtgaacggaatgggagggttgtctagcatgtccagtatgagtggtggatggggaatgtaattgatcgatcctgatcactgactcttggtcaaccttttttttttttttttttttttctttaagaaaacttcagtttaacagtttctgcaatacaagcttgtgatttatgcttactctaagtggaaatcaggattgttatgaagacttaaggcccagtatttttgaatacaatactcatctaggatgtaacagtgaagctgagtaaactataactgttaaacttaagttccagcttttctcaagttagttataggatgtacttaagcagtaagcgtatttaggtaaaagcagttgaattatgttaaatgttgccctttgccacgttaaattgaacactgttttggatgcatgttgaaagacatgcttttatttttttgtaaaacaata

SEQ ID NO: 2006 - DNA, 1855 bp, Artificial
  cDNA Sequence
tttaggttgcgcaggcgcccgctggccatttcgtcttagccacgcagaagtcgcgtgtctaggtgagtcgcggtgggtcctcgcttgcagttcagcgaccacgtttgtttcgacgccggaccgcgtaagagacgatgatgttgggcacggaaggtggagagggattcgtggtgaaggtccggggcttgccctggtcttgctcggccgatgaagtgcagaggtttttttctgactgcaaaattcaaaatggggctcaaggtattcgtttcatctacaccagagaaggcagaccaagtggcgaggcttttgttgaacttgaatcagaagatgaagtcaaattggccctgaaaaaagacagagaaactatgggacacagatatgttgaagtattcaagtcaaacaacgttgaaatggattgggtgttgaagcatactggtccaaatagtcctgacacggccaatgatggctttgtacggcttagaggacttccctttggatgtagcaaggaagaaattgttcagttcttctcagggttggaaatcgtgccaaatgggataacattgccggtggacttccaggggaggagtacgggggaggccttcgtgcagtttgcttcacaggaaatagctgaaaaggctctaaagaaacacaaggaaagaatagggcacaggtatattgaaatctttaagagcagtagagctgaagttagaactcattatgatccaccacgaaagcttatggccatgcagcggccaggtccttatgacagacctggggctggtagagggtataacagcattggcagaggagctggctttgagaggatgaggcgtggtgcttatggtggaggctatggaggctatgatgattacaatggctataatgatggctatggatttgggtcagatagatttggaagagacctcaattactgtttttcaggaatgtctgatcacagatacggggatggtggctctactttccagagcacaacaggacactgtgtacacatgcggggattaccttacagagctactgagaatgacatttataattttttttcaccgctcaaccctgtgagagtacacattgaaattggtcctgatggcagagtaactggtgaagcagatgtcgagttcgcaactcatgaagatgctgtggcagctatgtcaaaagacaaagcaaatatgcaacacagatatgtagaactcttcttgaattctacagcaggagcaagcggtggtgcttacgaacacagatatgtagaactcttcttgaattctacagcaggagcaagcggtggtgcttatggtagccaaatgatgggaggcatgggcttgtcaaaccagtccagctacgggggcccagccagccagcagctgagtgggggttacggaggcggctacggtggccagagcagcatgagtggatacgaccaagttttacaggaaaactccagtgattttcaatcaaacattgcataggtaaccaaggagcagtgaacagcagctactacagtagtggaagccgtgcatctatgggcgtgaacggaatgggagggttgtctagcatgtccagtatgagtggtggatggggaatgtaattgatcgatcctgatcactgactcttggtcaaccttttttttttttttttttttttctttaagaaaacttcagtttaacagtttctgcaatacaagcttgtgatttatgcttactctaagtggaaatcaggattgttatgaagacttaaggcccagtatttttgaatacaatactcatctaggatgtaacagtgaagctgagtaaactataactgttaaacttaagttccagcttttctcaagttagttata

SEQ ID NO: 2007 - DNA, 753 bp, Artificial
  cDNA Sequence
catttcgtcttagccacgcagaagtcgcgtgtctagtttgtttcgacgccggaccgcgtaagagacgatgatgttgggcacggaaggtggagagggattcgtggtgaaggtccggggcttgccctggtcttgctcggccgatgaagtgcagaggtttttttctgactgcaaaattcaaaatggggctcaaggtattcgtttcatctacaccagagaaggcagaccaagtggcgaggcttttgttgaacttgaatcagaagatgaagtcaaattggccctgaaaaaagacagagaaactatgggacacagatatgttgaagtattcaagtcaaacaacgttgaaatggattgggtgttgaagcatactggtccaaatagtcctgacacggccaatgatggctttgtacggcttagaggacttccctttggatgtagcaaggaagaaattgttcagttcttctcagggttggaaatcgtgccaaatgggataacattgccggtggacttccaggggaggagtacgggggaggccttcgtgcagtttgcttcacaggaaatagctgaaaaggctctaaagaaacacaaggaaagaatagggcacaggtatattgaaatctttaagagcagtagagctgaagttagaactcattatgatccaccacgaaagcttatggccatgcagcggccaggtccttatgacagacctggggctggtagagggtataacagcattggcagaggagctggctttga

SEQ ID NO: 2008 - DNA, 407 bp, Artificial
  cDNA Sequence
tttcgtcttagccacgcagaagtcgcgtgtctaggtgagtcgcggtgggtcctcgcttgcagttcagcgaccacgtttgtttcgacgccggaccgcgtaagagacgatgatgttgggcacggaaggtggagagggattcgtggtgaaggtccggggcttgccctggtcttgctcggccgatgaagtgcagaggtttttttctgactgcaaaattcaaaatggggctcaaggtattcgtttcatctacaccagagaaggcagaccaagtggcgaggcttttgttgaacttgaatcagaagatgaagtcaaattggccctgaaaaaagacagagaaactatgggacacagatatgttgaaggtttgatttacattgccctagttacagtaaataaagcattaaacaata

SEQ ID NO: 2009 - DNA, 718 bp, Artificial
  cDNA Sequence
gtttgtttcgacgccggaccgcgtaagagacgatgatgttgggcacggaaggtggagagggattcgtggtgaaggtccggggcttgccctggtcttgctcggccgatgaagtgcagaggtttttttctgactgcaaaattcaaaatggggctcaaggtattcgtttcatctacaccagagaaggcagaccaagtggcgaggcttttgttgaacttgaatcagaagatgaagtcaaattggccctgaaaaaagacagagaaactatgggacacagatatgttgaagtattcaagtcaaacaacgttgaaatggattgggtgttgaagcatactggtccaaatagtcctgacacggccaatgatggctttgtacggcttagaggacttccctttggatgtagcaaggaagaaattgttcagttcttctcagggttggaaatcgtgccaaatgggataacattgccggtggacttccaggggaggagtacgggggaggccttcgtgcagtttgcttcacaggaaatagctgaaaaggctctaaagaaacacaaggaaagaatagggcacaggtatattgaaatctttaagagcagtagagctgaagttagaactcattatgatccaccacgaaagcttatggccatgcagcggccaggtccttatgacagacctggggctggtagagggtataacagcattggcagaggagctggctttga

SEQ ID NO: 2010 - DNA, 1309 bp, Artificial
  cDNA Sequence
aggctatggaggctatgatgattacaatggctataatgatggctatggatttgggtcagatagatttggaagagacctcaattactgtttttcaggaatgtctgatcacagatacggggatggtggctctactttccagagcacaacaggacactgtgtacacatgcggggattaccttacagagctactgagaatgacatttataattttttttcaccgctcaaccctgtgagagtacacattgaaattggtcctgatggcagagtaactggtgaagcagatgtcgagttcgcaactcatgaagatgctgtggcagctatgtcaaaagacaaagcaaatatgcaacacagatatgtagaactcttcttgaattctacagcaggagcaagcggtggtgcttatggtagccaaatgatgggaggcatgggcttgtcaaaccagtccagctacgggggcccagccagccagcagctgagtgggggttacggaggcggctacggtggccagagcagcatgagtggatacggtaaccaaggagcagtgaacagcagctactacagtagtggaagccgtgcatctatgggcgtgaacggaatgggagggttgtctagcatgtccagtatgagtggtggatggggaatgtaattgatcgatcctgatcactgactcttggtcaaccttttttttttttttttttttttctttaagaaaacttcagtttaacagtttctgcaatacaagcttgtgatttatgcttactctaagtggaaatcaggattgttatgaagacttaaggcccagtatttttgaatacaatactcatctaggatgtaacagtgaagctgagtaaactataactgttaaacttaagttccagcttttctcaagttagttataggatgtacttaagcagtaagcgtatttaggtaaaagcagttgaattatgttaaatgttgccctttgccacgttaaattgaacactgttttggatgcatgttgaaagacatgcttttatttttttgtaaaacaatataggagctgtgtctactattaaaagtgaaacattttggcatgtttgttaattctagtttcatttaataacctgtaaggcacgtaagtttaagctttttttttttttaagttaatgggaaaaatttgagacgcaataccaatacttaggattttggtcttggtgtttgtatgaaattctgaggccttgatttaaatctttcattgtattgtgatttccttttaggtatattgcgctaagtgaaacttgtcaaataaatcctccttttaaaaactgca

SEQ ID NO: 2011 - DNA, 1309 bp, Artificial; identical to SEQ ID NO: 2010
  cDNA Sequence

SEQ ID NO: 2012 - DNA, 948 bp, Artificial
  cDNA Sequence
aggctatggaggctatgatgattacaatggctataatgatggctatggatttgggtcagatagatttggaagagacctcaattactgtttttcaggaatgtctgatcacagatacggggatggtggctctactttccagagcacaacaggacactgtgtacacatgcggggattaccttacagagctactgagaatgacatttataattttttttcaccgctcaaccctgtgagagtacacattgaaattggtcctgatggcagagtaactggtgaagcagatgtcgagttcgcaactcatgaagatgctgtggcagctatgtcaaaagacaaagcaaatatgcaacacagatatgtagaactcttcttgaattctacagcaggagcaagcggtggtgcttatggtagccaaatgatgggaggcatgggcttgtcaaaccagtccagctacgggggcccagccagccagcagctgagtgggggttacggaggcggctacggtggccagagcagcatgagtggatacgaccaagttttacaggaaaactccagtgattttcaatcaaacattgcataggtaaccaaggagcagtgaacagcagctactacagtagtggaagccgtgcatctatgggcgtgaacggaatgggagggttgtctagcatgtccagtatgagtggtggatggggaatgtaattgatcgatcctgatcactgactcttggtcaaccttttttttttttttttttttttctttaagaaaacttcagtttaacagtttctgcaatacaagcttgtgatttatgcttactctaagtggaaatcaggattgttatgaagacttaaggcccagtatttttgaatacaatactcatctaggatgtaacagtgaagctgagtaaactataactgttaaacttaagttccagcttttctcaagttagttata

SEQ ID NO: 2013 - DNA, 937 bp, Artificial
  cDNA Sequence
agtttttttcaccgctcaaccctgtgagagtacacattgaaattggtcctgatggcagagtaactggtgaagcagatgtcgagttcgcaactcatgaagatgctgtggcagctatgtcaaaagacaaagcaaatatgcaacacagatatgtagaactcttcttgaattctacagcaggagcaagcggtggtgcttacgaacacagatatgtagaactcttcttgaattctacagcaggagcaagcggtggtgcttatggtagccaaatgatgggaggcatgggcttgtcaaaccagtccagctacgggggcccagccagccagcagctgagtgggggttacggaggcggctacggtggccagagcagcatgagtggatacgaccaagttttacaggaaaactccagtgattttcaatcaaacattgcataggtaaccaaggagcagtgaacagcagctactacagtagtggaagccgtgcatctatgggcgtgaacggaatgggagggttgtctagcatgtccagtatgagtggtggatggggaatgtaattgatcgatcctgatcactgactcttggtcaaccttttttttttttttttttttttctttaagaaaacttcagtttaacagtttctgcaatacaagcttgtgatttatgcttactctaagtggaaatcaggattgttatgaagacttaaggcccagtatttttgaatacaatactcatctaggatgtaacagtgaagctgagtaaactataactgttaaacttaagttccagcttttctcaagttagttataggatgtacttaagcagtaagcgtatttaggtaaaagcagttgaattatgttaaatgttgccctttgccacgttaaattgaacactgttttggatgcatgttgaaagacatgcttttatttttttgtaaaacaata

SEQ ID NO: 2014 - DNA, 928 bp, Artificial
  cDNA Sequence
ctcggagcggagacggcaaatggcggacttcgacacctacgacgatcgggcctacagcagcttcggcggcggcagagggtcccgcggcagtgctggtggccatggttcccgtagccagaaggagttgcccacagagcccccctacacagcatacgtaggaaatctacctttcaatacggttcagggcgacatagatgctatctttaaggatctcagcataaggagtgtacggctagtcagagacaaagacacagataaatttaaaggattctgctatgtagaattcgatgaagtggattcccttaaggaagccttgacatacgatggtgcactgttgggcgatcggtcacttcgtgtggacattgcagaaggcagaaaacaagataaaggtggctttggattcagaaaaggtggaccagatgacagaggaatgggtagctctcgagaatctagaggtggatgggattcccgggatgacttcaattctggcttcagggatgacttcttagggggcaggggaggtagtcgcccaggcgaccggcgaacaggcccccccatgggcagccgcttcagagatggccctcccctccgtggatccaacatggatttcagagaacccacagaagaggaaagagcacagagaccacgactccagcttaaacctcgaacagtcgcgacgcccctcaatcaagtagccaatcccaactctgctatcttcgggggtgccaggcctagagaggaagtcgttcaaaaggagcaagaatgagcctgcggttgggagggaatggggcgtggggggttagagcaggaccacagcctggtgagtccccgggcagccgtcctgcagccgccactcctgcgcctgccattggcctcctcacagcggaaacacagcttgtgagtgcatgtcagctgttaacaagtggtt

SEQ ID NO: 2015 - DNA, 928 bp, Artificial; identical to SEQ ID NO: 2014
  cDNA Sequence

SEQ ID NO: 2016 - DNA, 979 bp, Artificial
  cDNA Sequence
cgatcgggcctacagcagcttcggcggcggcagagggattctgctatgtagaattcgatgaagtggattcccttaaggaagccttgacatacgatggtgcactgttgggcgatcggtcacttcgtgtggacattgcagaaggcagaaaacaagataaaggtggctttggattcagaaaaggtggaccagatgacagaggaatgggtagctctcgagaatctagaggtggatgggattcccgggatgacttcaattctggcttcagggatgacttcttagggggcaggggaggtagtcgcccaggcgaccggcgaacaggcccccccatgggcagccgcttcagagatggccctcccctccgtggatccaacatggatttcagagaacccacagaagaggaaagagcacagagaccacgactccagcttaaacctcgaacagtcgcgacgcccctcaatcaagtagccaatcccaactctgctatcttcgggggtgccaggcctagagaggaagtcgttcaaaaggagcaagaatgagcctgcggttgggagggaatggggcgtggggggttagagcaggaccacagcctggtgagtccccgggcagccgtcctgcagccgccactcctgcgcctgccattggcctcctcacagcggaaacacagcttgtgagtgcatgtcagctcttctctgcttctgagataagaaccatttgtgtaacaccaacacttaacttcagaaagacatgcattatgtggtgtaatcaaacccgatgctttcagatgacctacttacatcttcaatgtggataagataaagaacaaaacacatgcatctaaactgctgggcaatccagttgacttttaaatgtaagaatggaattccaaacacttaacacattcagctatatgacagaaagtaaatctatggatatggtattttgtgaatgatcttttaaataaaagaaaaccttacgtaat

SEQ ID NO: 2017 - DNA, 1161 bp, Artificial
  cDNA Sequence
accctggttcctctcggagcggagacggcaaatggcggacttcgacacctacgacgatcgggcctacagcagcttcggcggcggcagagggtcccgcggcagtgctggtggccatggttcccgtagccagaaggagttgcccacagagcccccctacacagcatacgtaggaaatctacctttcaatacggttcagggcgacatagatgctatctttaaggatctcagcataaggagtgtacggctagtcagagacaaagacacagataaatttaaaggattctgctatgtagaattcgatgaagtggattcccttaaggaagccttgacatacgatggtgcactgttgggcgatcggtcacttcgtgtggacattgcagaaggcagaaaacaagataaaggtggctttggattcagaaaaggtggaccagatgacagaggcttcagggatgacttcttagggggcaggggaggtagtcgcccaggcgaccggcgaacaggcccccccatgggcagccgcttcagagatggccctcccctccgtggatccaacatggatttcagagaacccacagaagaggaaagagcacagagaccacgactccagcttaaacctcgaacagtcgcgacgcccctcaatcaagtagccaatcccaactctgctatcttcgggggtgccaggcctagagaggaagtcgttcaaaaggagcaagaatgagcctgcggttgggagggaatggggcgtggggggttagagcaggaccacagcctggtgagtccccgggcagccgtcctgcagccgccactcctgcgcctgccattggcctcctcacagcggaaacacagcttgtgagtgcatgtcagctcttctctgcttctgagataagaaccatttgtgtaacaccaacacttaacttcagaaagacatgcattatgtggtgtaatcaaacccgatgctttcagatgacctacttacatcttcaatgtggataagataaagaacaaaacacatgcatctaaactgctgggcaatccagttgacttttaaatgtaagaatggaattccaaacacttaacacattcagctatatgacagaaagtaaatctatggatatggtattttgtgaatgatcttttaaataaaagaaaaccttacgtaat

SEQ ID NO: 2018 - DNA, 925 bp, Artificial
  cDNA Sequence
accctggttcctctcggagcggagacggcaaatggcggacttcgacacctacgacgatcgggcctacagcagcttcggcggcggcagagggtcccgcggcagtgctggtggccatggttcccgtagccagaaggagttgcccacagagcccccctacacagcatacgtaggaaatctacctttcaatacggttcagggcgacatagatgctatctttaaggatctcagcataaggagtgtacggctagtcagagacaaagacacagataaatttaaaggattctgctatgtagaattcgatgaagtggattcccttaaggaagccttgacatacgatggtgcactgttgggcgatcggtcacttcgtgtggacattgcagaaggcagaaaacaagataaaggtggctttggattcagaaaaggtggaccagatgacagaggcttcagggatgacttcttagggggcaggggaggtagtcgcccaggcgaccggcgaacaggcccccccatgggcagccgcttcagagatggccctcccctccgtggatccaacatggatttcagagaacccacagaagaggaaagagcacagagaccacgactccagcttaaacctcgaacagtcgcgacgcccctcaatcaagtagccaatcccaactctgctatcttcgggggtgccaggcctagagaggaagtcgttcaaaaggagcaagaatgagcctgcggttgggagggaatggggcgtggggggttagagcaggaccacagcctggtgagtccccgggcagccgtcctgcagccgccactcctgcgcctgccattggcctcctcacagcggaaacacagcttgtgagtgcatgtcagctgttaacaagtggtttttagtacattctgggctttgctgtatctatctagtgcctgtttg

SEQ ID NO: 2019 - DNA, 504 bp, Artificial
  cDNA Sequence
ctggttcctctcggagcggagacggcaaatggcggacttcgacacctacgacgatcgggcctacagcagcttcggcggcggcagagggtcccgcggcagtgctggtggccatggttcccgtagccagaaggagttgcccacagagcccccctacacagcatacgtaggaaatctacctttcaatacggttcagggcgacatagatgctatctttaaggatctcagcataaggagtgtacggctagtcagagacaaagacacagataaatttaaaggattctgctatgtagaattcgatgaagtggattcccttaaggaagccttgacatacgatggtgcactgttgggcgatcggtcacttcgtgtggacattgcagaaggcagaaaacaagataaaggtggctttggattcagaaaaggtggaccagatgacagaggaatgggtagctctcgagaatctagaggtggatgggattcccgggatgacttcaattctggtatcag

SEQ ID NO: 2020 - DNA, 640 bp, Artificial
  cDNA Sequence
agcctgtccggcagtgcggcggatgtacggatgattcagtggctggcaggaagcccgccctgcccgcccgccagtgtcagtggtgttggcatcagcttgggcaggtgtgcgggctcaggatggggcggccgtggtgaggaaccctggactctcagagatggaatttcaccgtgttgcctaggctggtctggagctcttgatctcaagcgatcctccctgcctcggcctcccaacgtgctgggattataggcgtgagccaccgctcctggccagggtctgttcctagttgcaacagttcttggaaacccactcgagagggccacgcctccattcaccaggccacgcatcacaagaggcaacaccaggagccaacatgagctcggggactgaactgctgtggcccggagcagcgctgctggtgctgttgggggtggcagccagtctgtgtgtgcgctgctcacgcccaggtgcaaagaggtcagagaaaatctaccagcagagaagtctgcgtgaggaccaacagagctttacggggtcccggacctactccttggtcgggcaggcatggccaggacccctggcggacatggcacccacaaggaaggacaagctgttgcaattctaccccagcctggagggt

SEQ ID NO: 2021 - DNA, 438 bp, Artificial
  cDNA Sequence
ggaagcccgccctgcccgcccgccagtgtcagtggtgttggcatcagcttgggcaggtgtgcgggctcaggatggggcggccgtggtgaggaaccctggactctcagcatcacaagaggcaacaccaggagccaacatgagctcggggactgaactgctgtggcccggagcagcgctgctggtgctgttgggggtggcagccagtctgtgtgtgcgctgctcacgcccaggtgcaaagaggtcagagaaaatctaccagcagagaagtctgcgtgaggaccaacagagctttacggggtcccggacctactccttggtcgggcaggcatggccaggacccctggcggacatggcacccacaaggaaggacaagctgttgcaattctaccccagcctggaggatccagcatcttccaggtaccagaacttcagcaaagg

SEQ ID NO: 2022 - DNA, 1253 bp, Artificial
  cDNA Sequence
gcccgccctgcccgcccgccagtgtcagtggtgttggcatcagcttgggcaggtgtgcgggctcaggatggggcggccgtggtgaggaaccctggactctcagcatcacaagaggcaacaccaggagccaacatgagctcggggactgaactgctgtggcccggagcagcgctgctggtgctgttgggggtggcagccagtctgtgtgtgcgctgctcacgcccaggtgcaaagaggtcagagaaaatctaccagcagagaagtctgcgtgaggaccaacagagctttacggggtcccggacctactccttggtcgggcaggcatggccaggacccctggcggacatggcacccacaaggaaggacaagctgttgcaattctaccccagcctggaggatccagcatcttccaggtaccagaacttcagcaaaggaagcagacacgggtcggaggaagcctacatagaccccattgccatggagtattacaactgggggcggttctcgaagcccccagaagatgatgatgccaattcctacgagaatgtgctcatttgcaagcagaaaaccacagagacaggtgcccagcaggagggcataggtggcctctgcagaggggacctcagcctgtcactggccctgaagactggccccacttctggtctctgtccctctgcctccccggaagaagatgaggaatctgaggattatcagaactcagcatccatccatcagtggcgcgagtccaggaaggtcatggggcaactccagagagaagcatcccctggcccggtgggaagcccagacgaggaggacggggaaccggattacgtgaatggggaggtggcagccacagaagcctagggcagaccaagaagaaaggagccaaggcaaagagggaccactgtgctcatggacccatcgctgccttccaaggaccatttcccagagctactcaacttttaagcccctgccatggttgctcctggaaggagaaccagccaccctgaggaccacctggccatgcgtgcacagcctgggaaaagacagttactcacgggagctgcaggcccgtcaccaagccctctcccgacccaggctttgtggggcaggcacctggtaccaagggtaacccggctcctggtatggacggatgcgcaggatttaggataagctgtcacccagtccccataacaaaaccactgtccaacactggtatctgtgttcttttgtgctatgaatttggattccta

SEQ ID NO: 2023 - DNA, 1376 bp, Artificial
  cDNA Sequence
gatggggcggccgtggtgaggaaccctggactctcagagatggaatttcaccgtgttgcctaggctggtctggagctcttgatctcaagcgatcctccctgcctcggcctcccaacgtgctgggattataggcgtgagccaccgctcctggccagggtctgttcctagttgcaacagttcttggaaacccactcgagagggccacgcctccattcaccaggccacgcatcacaagaggcaacaccaggagccaacatgagctcggggactgaactgctgtggcccggagcagcgctgctggtgctgttgggggtggcagccagtctgtgtgtgcgctgctcacgcccaggtgcaaagaggtcagagaaaatctaccagcagagaagtctgcgtgaggaccaacagagctttacggggtcccggacctactccttggtcgggcaggcatggccaggacccctggcggacatggcacccacaaggaaggacaagctgttgcaattctaccccagcctggaggatccagcatcttccaggtaccagaacttcagcaaaggaagcagacacgggtcggaggaagcctacatagaccccattgccatggagtattacaactgggggcggttctcgaagcccccagaagatgatgatgccaattcctacgagaatgtgctcatttgcaagcagaaaaccacagagacaggtgcccagcaggagggcataggtggcctctgcagaggggacctcagcctgtcactggccctgaagactggccccacttctggtctctgtccctctgcctccccggaagaagatgaggaatctgaggattatcagaactcagcatccatccatcagtggcgcgagtccaggaaggtcatggggcaactccagagagaagcatcccctggcccggtgggaagcccagacgaggaggacggggaaccggattacgtgaatggggaggtggcagccacagaagcctagggcagaccaagaagaaaggagccaaggcaaagagggaccactgtgctcatggacccatcgctgccttccaaggaccatttcccagagctactcaacttttaagcccctgccatggttgctcctggaaggagaaccagccaccctgaggaccacctggccatgcgtgcacagcctgggaaaagacagttactcacgggagctgcaggcccgtcaccaagccctctcccgacccaggctttgtggggcaggcacctggtaccaagggtaacccggctcctggtatggacggatgcgcaggatttaggataagctgtcacccagtccccataacaaaaccactgtccaacactggtatctgtgttcttttgtgctatgaatttggattccta

SEQ ID NO: 2024 - DNA, 1343 bp, Artificial
  cDNA Sequence
ggccgtggtgaggaaccctggactctcagagatggaatttcaccgtgttgcctaggctggtctggagctcttgatctcaagcgatcctccctgcctcggcctcccaacgtgctgggattataggcgtgagccaccgctcctggccagggtctgttcctagttgcaacagttcttggaaacccactcgagagggccacgcctccattcaccaggccacgcatcacaagaggcaacaccaggagccaacatgagctcggggactgaactgctgtggcccggagcagcgctgctggtgctgttgggggtggcagccagtctgtgtgtgcgctgctcacgcccaggtgcaaagaggtcagagaaaatctaccagcagagaagtctgcgtgaggaccaacagagctttacggggtcccggacctactccttggtcgggcaggcatggccaggacccctggcggacatggcacccacaaggaaggacaagctgttgcaattctaccccagcctggaggatccagcatcttccaggtaccagaacttcagcaaaggaagcagacacgggtcggaggaagcctacatagaccccattgccatggagtattacaactgggggcggttctcgaagcccccagaagatgatgatgccaattcctacgagaatgtgctcatttgcaagcagaaaaccacagagacaggtgcccagcaggagggcataggtggcctctgcagaggggacctcagcctctgtcacccagtccccataacaaaaccactgtccaacactggtatctgtgttcttttgtgctatgaatttggattcctaattgctattgttggttgctggggttttaaatgattgataagcttgtacagttaacttatagagggggagccatatttaacattctggatttcagagtagagatttctgtgttgtctcctagaaagcattacatgtagtttatttcagcatccttgttgggtggggccctggctctcttcccctttggtgggacctcccctttctttgggcttcagttcactcaggaagaaatgaggctgtcgccatctttatgtgcttccagtggaaatgtcacttgctacagacaatagtgcatgagagtctagagaagtagtgaccagaacagggcagagtaggtcccctccatggccctgaatcctcctctgctccagggctggcctctgcagagctgattaaacagtgttgtgactgtctcatgggaagagctggggcccagagggaccttgagtcagaaatgttgccagaaaaagtatctcctccaaccaaaacatctcaataaaaccattttagttgaaaagca

SEQ ID NO: 2025 - DNA, 1316 bp, Artificial
  cDNA Sequence
agagatggaatttcaccgtgttgcctaggctggtctggagctcttgatctcaagcgatcctccctgcctcggcctcccaacgtgctgggattataggcgtgagccaccgctcctggccagggtctgttcctagttgcaacagttcttggaaacccactcgagagggccacgcctccattcaccaggccacgcatcacaagaggcaacaccaggagccaacatgagctcggggactgaactgctgtggcccggagcagcgctgctggtgctgttgggggtggcagccagtctgtgtgtgcgctgctcacgcccaggtgcaaagaggtcagagaaaatctaccagcagagaagtctgcgtgaggaccaacagagctttacggggtcccggacctactccttggtcgggcaggcatggccaggacccctggcggacatggcacccacaaggaaggacaagctgttgcaattctaccccagcctggaggatccagcatcttccaggtaccagaacttcagcaaaggaagcagacacgggtcggaggaagcctacatagaccccattgccatggagtattacaactgggggcggttctcgaagcccccagaagatgatgatgccaattcctacgagaatgtgctcatttgcaagcagaaaaccacagagacaggtgcccagcaggagggcataggtggcctctgcagaggggacctcagcctctgtcacccagtccccataacaaaaccactgtccaacactggtatctgtgttcttttgtgctatgaatttggattcctaattgctattgttggttgctggggttttaaatgattgataagcttgtacagttaacttatagagggggagccatatttaacattctggatttcagagtagagatttctgtgttgtctcctagaaagcattacatgtagtttatttcagcatccttgttgggtggggccctggctctcttcccctttggtgggacctcccctttctttgggcttcagttcactcaggaagaaatgaggctgtcgccatctttatgtgcttccagtggaaatgtcacttgctacagacaatagtgcatgagagtctagagaagtagtgaccagaacagggcagagtaggtcccctccatggccctgaatcctcctctgctccagggctggcctctgcagagctgattaaacagtgttgtgactgtctcatgggaagagctggggcccagagggaccttgagtcagaaatgttgccagaaaaagtatctcctccaaccaaaacatctcaataaaaccattttagttgaaaagca

SEQ ID NO: 2026 - DNA, 1341 bp, Artificial
  cDNA Sequence
agagatggaatttcaccgtgttgcctaggctggtctggagctcttgatctcaagcgatcctccctgcctcggcctcccaacgtgctgggattataggcgtgagccaccgctcctggccagggtctgttcctagttgcaacagttcttggaaacccactcgagagggccacgcctccattcaccaggccacgcatcacaagaggcaacaccaggagccaacatgagctcggggactgaactgctgtggcccggagcagcgctgctggtgctgttgggggtggcagccagtctgtgtgtgcgctgctcacgcccaggtgcaaagaggtcagagaaaatctaccagcagagaagtctgcgtgaggaccaacagagctttacggggtcccggacctactccttggtcgggcaggcatggccaggacccctggcggacatggcacccacaaggaaggacaagctgttgcaattctaccccagcctggaggatccagcatcttccaggtaccagaacttcagcaaaggaagcagacacgggtcggaggaagcctacatagaccccattgccatggagtattacaactgggggcggttctcgaagcccccagaagatgatgatgccaattcctacgagaatgtgctcatttgcaagcagaaaaccacagagacaggtgcccagcaggagggcataggtggcctctgcagaggggacctcagcctgtcactggccctgaagactggccccacttctggtctctgtccctctgcctccccggaagaagatgaggaatctgaggattatcagaactcagcatccatccatcagtggcgcgagtccaggaaggtcatggggcaactccagagagaagcatcccctggcccggtgggaagcccagacgaggaggacggggaaccggattacgtgaatggggaggtggcagccacagaagcctagggcagaccaagaagaaaggagccaaggcaaagagggaccactgtgctcatggacccatcgctgccttccaaggaccatttcccagagctactcaacttttaagcccctgccatggttgctcctggaaggagaaccagccaccctgaggaccacctggccatgcgtgcacagcctgggaaaagacagttactcacgggagctgcaggcccgtcaccaagccctctcccgacccaggctttgtggggcaggcacctggtaccaagggtaacccggctcctggtatggacggatgcgcaggatttaggataagctgtcacccagtccccataacaaaaccactgtccaacactggtatctgtgttcttttgtgctatgaatttggattccta

SEQ ID NO: 2027 - DNA, 1154 bp, Artificial
  cDNA Sequence
tcagcatcacaagaggcaacaccaggagccaacatgagctcggggactgaactgctgtggcccggagcagcgctgctggtgctgttgggggtggcagccagtctgtgtgtgcgctgctcacgcccaggtgcaaagaggtcagagaaaatctaccagcagagaagtctgcgtgaggaccaacagagctttacggggtcccggacctactccttggtcgggcaggcatggccaggacccctggcggacatggcacccacaaggaaggacaagctgttgcaattctaccccagcctggaggatccagcatcttccaggtaccagaacttcagcaaaggaagcagacacgggtcggaggaagcctacatagaccccattgccatggagtattacaactgggggcggttctcgaagcccccagaagatgatgatgccaattcctacgagaatgtgctcatttgcaagcagaaaaccacagagacaggtgcccagcaggagggcataggtggcctctgcagaggggacctcagcctgtcactggccctgaagactggccccacttctggtctctgtccctctgcctccccggaagaagatgaggaatctgaggattatcagaactcagcatccatccatcagtggcgcgagtccaggaaggtcatggggcaactccagagagaagcatcccctggcccggtgggaagcccagacgaggaggacggggaaccggattacgtgaatggggaggtggcagccacagaagcctagggcagaccaagaagaaaggagccaaggcaaagagggaccactgtgctcatggacccatcgctgccttccaaggaccatttcccagagctactcaacttttaagcccctgccatggttgctcctggaaggagaaccagccaccctgaggaccacctggccatgcgtgcacagcctgggaaaagacagttactcacgggagctgcaggcccgtcaccaagccctctcccgacccaggctttgtggggcaggcacctggtaccaagggtaacccggctcctggtatggacggatgcgcaggatttaggataagctgtcacccagtccccataacaaaaccactgtccaacactggtatctgtgttcttttgtgctatgaatttggattccta

SEQ ID NO: 2028 - DNA, 982 bp, Artificial
  cDNA Sequence
ggggacagggagcactgcaaaggctcagacacgggaaatagctggccctgccttgggctgcagcacccgagctgggtgcaaagcaggggccaggggagaaagcaattagctgggtctttcttccagatccagcatcttccaggtaccagaacttcagcaaaggaagcagacacgggtcggaggaagcctacatagaccccattgccatggagtattacaactgggggcggttctcgaagcccccagaagatgatgatgccaattcctacgagaatgtgctcatttgcaagcagaaaaccacagagacaggtgcccagcaggagggcataggtggcctctgcagaggggacctcagcctgtcactggccctgaagactggccccacttctggtctctgtccctctgcctccccggaagaagatgaggaatctgaggattatcagaactcagcatccatccatcagtggcgcgagtccaggaaggtcatggggcaactccagagagaagcatcccctggcccggtgggaagcccagacgaggaggacggggaaccggattacgtgaatggggaggtggcagccacagaagcctagggcagaccaagaagaaaggagccaaggcaaagagggaccactgtgctcatggacccatcgctgccttccaaggaccatttcccagagctactcaacttttaagcccctgccatggttgctcctggaaggagaaccagccaccctgaggaccacctggccatgcgtgcacagcctgggaaaagacagttactcacgggagctgcaggcccgtcaccaagccctctcccgacccaggctttgtggggcaggcacctggtaccaagggtaacccggctcctggtatggacggatgcgcaggatttaggataagctgtcacccagtccccataacaaaaccactgtccaacactggtatctgtgttcttttgtgctatgaatttggattccta

SEQ ID NO: 2029 - DNA, 500 bp, Artificial
  cDNA Sequence
gtcagctctgtggcctcctccgtggggggtcggcccagccgcagtggcctgctcacggagacctcttcacgctacgcccgcaagatctcgggcaccacggccttgcaggaggcactgaaggagaagcagcagcacattgagcagctgctggctgaacgagacctggaacgggctgaggtggccaaggccacaagccacatctgcgaggtggagaaggagattgccctgctcaaggcacagcatgagcagtatgttgcagaagccgaggagaagctgcagcgagcccggctgctcgtggagagcgtgcggaaagagaaggtggacctgtccaaccagctggaggaggagaggaggtacgtggaggatctgcagttccgcgtggaggaggagtccatcaccaagggagacctggagctgaccacagtggccgagaagtcgcgcgtgctgcagctggaggaggagctcaccctgcgccgaggtgaaatcgaggagctccagca

SEQ ID NO: 2030 - DNA, 604 bp, Artificial
  cDNA Sequence
gctcaaggcacagcatgagcagtatgttgcagaagccgaggagaagctgcagcgagcccggctgctcgtggagagcgtgcggaaagagaaggtggacctgtccaaccagctggaggaggagaggaggtacgtggaggatctgcagttccgcgtggaggaggagtccatcaccaagggagacctggagacccagacgcagctggagcacgcgcgcattggggagctggaacagagcctgctactggagaaggcgcaggccgagcggctgctccgagaattagcggacaacaggctgaccacagtggccgagaagtcgcgcgtgctgcagctggaggaggagctcaccctgcgccgaggtgaaatcgaggagctccagcagtgcctgttgcactcgggtcccccacctccggaccacccagacgccgccgagatcctgcggctacgggagcggctgctctcggccagcaaggaacaccagagggagagtggggtgctgcgggataaatacgagaaggccctgaaggcctaccaggcggaggtggacaagctccgcgcggccaacgagaagtacgcacaggaggtggcgggcctgaaggacaaggtt

SEQ ID NO: 2031 - DNA, 1223 bp, Artificial
  cDNA Sequence
ctcgggcccaggcgcccagcagaaggagatcggcgagctgaaggcagtgatggagggcatcaagatggagcaccagctggagctgggtaacttgcaggccaagcatgacctggagaccgccatgcacgtgaaggagaaggaggccctgcgagagaagctgcaggaggcccaggaggagctggctgggctgcagcggcactggcgggcccagctggaggtgcaagccagccagcaccggctggagctgcaggaggcccaggaccagcgccgggatgccgagctgcgtgtgcacgagctggaaaaactggacgtggagtaccggggccaggcgcaggctatcgagttcctcaaggagcagatctcgctggccgagaagaagatgttggactacgagcggctgcagcgggcagaagcccagggcaaacaggaggtcgagagtttgcgggagaagctcctggtggctgagaacagactccaggcggtcgaggccctgtgctcctcccagcacacccacatgattgagtcgaatgacatttcagaggagacgatcaggacgaaggaaactgtggagggcctgcaggacaagctgaacaagagggacaaagaggtgacagccttgacctcccagaccgagatgctcagggcccaagtaagtgcgctggagagcaagtgtaagtcaggcgagaagaaggtggacgccctcctgaaggagaagcggcgcctggaggcagagctggagaccgtgtcccggaagacccatgacgcctcgggccagctagtcctcatcagccaggagctgctgcggaaggagcggagcctgaacgaactgcgggtgttgctgctggaggccaatcgtcactccccagggccggagagggacctgagccgtgaggtacacaaggctgagtggcggatcaaggagcagaaactcaaggatgacatccggggcctgcgtgaaaagctgaccgggctggacaaagagaaatccctgtcggatcagaggcgctactccctcatcgaccggtcctcggcgcccgagcttctgcggctgcagcaccagctgatgagcacggaggacgccctgcgggatgcgctggaccaggctcagcaggtggagaagctgatggaggccatgaggagctgccctgacaaggcccagaccatcggcaattccggttctgcaaacggcatccaccagcaggacaaagctcagaaacaagagg

SEQ ID NO: 2032 - DNA, 833 bp, Artificial
  cDNA Sequence
ggacgtggagtaccggggccaggcgcaggctatcgagttcctcaaggagcagatctcgctggccgagaagaagatgttggactacgagcggctgcagcgggcagaagcccagggcaaacaggagatgattgagtcgaatgacatttcagaggagacgatcaggacgaaggaaactgtggagggcctgcaggacaagctgaacaagagggacaaagaggtgacagccttgacctcccagaccgagatgctcagggcccaagtaagtgcgctggagagcaagtgtaagtcaggcgagaagaaggtggacgccctcctgaaggagaagcggcgcctggaggcagagctggagaccgtgtcccggaagacccatgacgcctcgggccagctagtcctcatcagccaggagctgctgcggaaggagcggagcctgaacgaactgcgggtgttgctgctggaggccaatcgtcactccccagggccggagagggacctgagccgtgaggtacacaaggctgagtggcggatcaaggagcagaaactcaaggatgacatccggggcctgcgtgaaaagctgaccgggctggacaaagagaaatccctgtcggatcagaggcgctactccctcatcgaccggtcctcggcgcccgagcttctgcggctgcagcaccagctgatgagcacggaggacgccctgcgggatgcgctggaccaggctcagcaggtggagaagctgatggaggccatgaggagctgccctgacaaggcccagaccatcggcaattccggttctgcaaacggcatccaccagcaggacaaagctcagaaacaagagg

SEQ ID NO: 2033 - DNA, 1189 bp, Artificial
  cDNA Sequence
gcaggacaagctgaacaagagggacaaagaggtgacagccttgacctcccagaccgagatgctcagggcccaagtaagtgcgctggagagcaagtgtaagtcaggcgagaagaaggtggacgccctcctgaaggagaagcggcgcctggaggcagagctggagaccgtgtcccggaagacccatgacgcctcgggccagctagtcctcatcagccaggagctgctgcggaaggagcggagcctgaacgaactgcgggtgttgctgctggaggccaatcgtcactccccagggccggagagggacctgagccgtgaggtacacaaggctgagtggcggatcaaggagcagaaactcaaggatgacatccggggcctgcgtgaaaagctgaccgggctggacaaagagaaatccctgtcggatcagaggcgctactccctcatcgaccggtcctcggcgcccgagcttctgcggctgcagcaccagctgatgagcacggaggacgccctgcgggatgcgctggaccaggctcagcaggtggagaagctgatggaggccatgaggagctgccctgacaaggcccagaccatcggcaattccggttctgcaaacggcatccaccagcaggacaaagctcagaaacaagaggacaagcactgatcctgaggggatactgtggagcagcccagtccacaccagagccccacgcggctgcccggcagtacctcctccaggcaggagccgggactgtcactttggagacaaaacagtgtttgtaacaataacgtactcaccgccgcggacaatcccccaccccgatccctcgccagaccaggacgcttcctcaagcccagccttctacagagagtgtgaacggtacagccccggcctgacccggggaccttcagcctggacacccggcagcttctggagtttgtcagtggaggcagaggggatccggccaggcccctctgtccagaaggagctgccctgaggaccatcttagcggccctgtcctctttttccgcccattctccctcgggtctccccagaggggccggcgggggctggggagggggtaagtttatccatgcagacaccaagggggagcatccagtctttaagagccaagtgggggccccttttccgaagccacttccaggccaaggcagtcgccagggcttcttgtcc

SEQ ID NO: 2034 - DNA, 1230 bp, Artificial
  cDNA Sequence
gcacggcgctccccaaccacgccatccgagagctcaagcaggaagcaccttcctgcccccttgcccccagcgacctgggcctgagtcggcccatgccagagcccaaggccaccggtgcccaagacttctccgactgttgtggacagaagcccactgggcctggtgggcctctcatccagaacgtccatgcctccaagcgcattctcttctccatcgtccatgacaagtcagagaagtgggacgccttcataaaggaaaccgaggacatcaacacgctccgggagtgtgtgcagatcctgtttaacagcagatatgcggaagccctgggcctggaccacatggtccccgtgccctaccggaagattgcctgtgacccggaggctgtggagatcgtgggcatcccggacaagatccccttcaagcgcccctgcacttatggagtccccaagctgaagcggatcctggaggagcgccatagtatccacttcatcattaagaggatgtttgatgagcgaattttcacagggaacaagtttaccaaagacaccacgaagctggagccagccagcccgccagaggacacctctgcagaggtctctagggccaccgtccttgaccttgctgggaatgctcggtcagacaagggcagcatgtctgaagactgtgggccaggaacctccggggagctgggcgggctgaggccgatcaaaattgagccagaggatctggacatcattcaggtcaccgtcccagacccctcgccaacctctgaggaaatgacagactcgatgcctgggcacctgccatcggaggattctggttatgggatggagatgctgacagacaaaggtctgagtgaggacgcgcggcccgaggagaggcccgtggaggacagccacggtgacgtgatccggcccctgcggaagcaggtggagctgctcttcaacacacgatacgccaaggccattggcatctcggagcccgtcaaggtgccgtactccaagtttctgatgcacccggaggagctgtttgtggtgggactgcctgaaggcatctccctccgcaggcccaactgcttcgggatcgccaagctccggaagattctggaggccagcaacagcatccagtttgtcatcaagaggcccgagctgctcactgagggagtcaaagagcccatcatggatagtcaagagagggattccggggaccctctggtggacgagagcctga

SEQ ID NO: 2035 - DNA, 419 bp, Artificial
  cDNA Sequence
gaaaccgaggacatcaacacgctccgggagtgtgtgcagatcctgtttaacagcagatatgcggaagccctgggcctggaccacatggtccccgtgccctaccggaagattgcctgtgacccggaggctgtggagatcgtgggcatcccggacaagatccccttcaagcgcccctgcacttatggagtccccaagctgaagcggatcctggaggagcgccatagtatccacttcatcattaagaggatgtttgatgagcgaattttcacagggaacaagtttaccaaagacaccacgaagctggagccagccagcccgccagaggacacctctgcagaggtctctagggccaccgtccttgaccttgctgggaatgctcggtcagacaagggcagcatgtctgaagactgtgggccagg

SEQ ID NO: 2036 - DNA, 1111 bp, Artificial
  cDNA Sequence
gcacccggaggagctgtttgtggtgggactgcctgaaggcatctccctccgcaggcccaactgcttcgggatcgccaagctccggaagattctggaggccagcaacagcatccagtttgtcatcaagagaaaattatgacgcgaggctctcacggatcgacatcgccaacacactaagggagcaggtccaggaccttttcaataagaaatacggggaagccttgggcatcaagtacccggtccaggtcccctacaagcggatcaagagtaaccccggctccgtgatcatcgaggggctgcccccaggaatcccgttccgaaagccctgtaccttcggctcccagaacctggagaggattcttgctgtggctgacaagatcaagttcacagtcaccaggcctttccaaggactcatcccaaagcctgatgaagatgacgccaacagactcggggagaaggtgatcctgcgggagcaggtgaaggaactcttcaacgagaaatacggtcagccctgggcctgaaccggccggtgctggtcccttataaactaatccgggacagcccagacgccgtggaggtcacgggtctgcctgatgacatccccttccggaaccccaacacgtacgacatccaccggctggagaagatcctgaaggcccgagagcatgtccgcatggtcatcattaaccagctccaaccctttgcagaaatctgcaatgatgccaaggtgccagccaaagacagcagcattcccaagcgcaagagaaagcgggtctcggaaggaaattccgtctcctcttcctcctcgtcttcctcttcctcgtcctctaacccggattcagtggcatcggccaaccagatctcactcgtgcaatggccaatgtacatggtggactatgccggcctgaacgtgcagctcccgggacctcttaattactagacctcagtactgaatcaggacctcactcagaaagactaaaggaaatgtaatttatgtacaaaatgtatattcggatatgtatcgatgccttttagtttttccaatgatttttacactatattcctgccaccaaggcctttttaaataagtaaaaaaagaaaaaaaaaaaaa

SEQ ID NO: 2037 - DNA, 455 bp, Artificial
  cDNA Sequence
cagagcacttttccagggagctcaggaggctgagacagaaaagcctcagcttccagtgtcaacagccttttcccctccttccagccaaagacagcagcattcccaagcgcaagagaaagcgggtctcggaaggaaattccgtctcctcttcctcctcgtcttcctcttcctcgtcctctaacccggattcagtggcatcggccaaccagatctcactcgtgcaatggccaatgtacatggtggactatgccggcctgaacgtgcagctcccgggacctcttaattactagacctcagtactgaatcaggacctcactcagaaagactaaaggaaatgtaatttatgtacaaaatgtatattcggatatgtatcgatgccttttagtttttccaatgatttttacactatattcctgccaccaaggcctttttaaataagtaaaaaaagaaaaaaa

SEQ ID NO: 2038 - DNA, 614 bp, Artificial
  cDNA Sequence
gaggaggaggaggagggtgagagagaagctgggagagcagagaaaaggggccaccggtcgcccccccgcttccccgcacgcgctctccagccgcggccgcccgcctgccgcggtcaccccggcctctgcctctgtcccccagtgatcggatcaaggcgctgagcgaggccctgcctgcggggcggccatgcggcggtgacaggagcgcgaccgacacgcacgggcccctcgccccctctcgcctcccgtccgctcgccagctcccctcagccgaggctgctccgcggcggccgcagcccgcgcgcggcccacactcgcctcccctcggcacccccggccccggagctgcctggaggcggccgcactcggggatcatggcccaagttgcaatgtccaccctccccgttgaagatgaggagtcctcggagagcaggatggtggtgacattcctcatgtcagctctcgagtccatgtgtaaagaactggccaagtccaaagccgaagtggcctgcattgcagtgtatgaaacagacgtgtttgtcgtcggaactgaaagaggacgtgcttttgtcaataccagaaaggattttcaaaaagattttgtaaaatattgt

SEQ ID NO: 2039 - DNA, 1894 bp, Artificial
  cDNA Sequence
cacagggatcatggcccaagttgcaatgtccaccctccccgttgaagatgaggagtcctcggagagcaggatggtggtgacattcctcatgtcagctctcgagtccatgtgtaaagaactggccaagtccaaagccgaagtggcctgcattgcagtgtatgaaacagacgtgtttgtcgtcggaactgaaagaggacgtgcttttgtcaataccagaaaggattttcaaaaagattttgtaaaatattgtgttgaagaagaagaaaaagctgcagagatgcataaaatgaaatctacaacccaggcaaatcggatgagtgtagatgctgtagaaattgaaacactcagaaaaacagttgaggactatttctgcttttgctatgggaaagctttaggcaaatccacagtggtacctgtaccatatgagaagatgctgcgagaccagtcggctgtggtagtgcaggggcttccggaaggtgttgcctttaaacaccccgagaactatgatcttgcaaccctgaaatggattttggagaacaaagcagggatttcattcatcattaagagaccttttttagagccaaagaagcatgtaggtggtcgtgtgatggtaacagatgctgacaggtcaatactatctccaggtggaagttgtggccccatcaaagtgaaaactgaacccacagaagattctggcatttccctggaaatggcagctgtgacagtaaaggaagaatcagaagatcctgattattatcaatataacattcaaggaagccaccattcttcagagggcaatgaaggcacagaaatggaagtaccagcagaagattctactcaacatgtcccttcagaaacaagtgaggaccctgaagttgaggtgactattgaagatgatgattattctccaccgtctaagagaccaaaggccaatgagctaccgcagccaccagtcccggaacccgccaatgctgggaagcggaaagtgagggagttcaacttcgagaaatggaatgctcgcatcactgatctacgtaaacaagttgaagaattgtttgaaaggaaatatgctcaagccataaaagccaaaggtccggtgacgatcccgtaccctcttttccagtctcatgttgaagatctttatgtagaaggacttcctgaaggaattccttttagaaggccatctacttacggaattcctcgcctggagaggatattacttgcaaaggaaaggattcgttttgtgattaagaaacatgagcttctgaattcaacacgtgaagatttacagcttgataagccagcttcaggagtaaaggaagaatggtatgccagaatcactaaattaagaaagatggtggatcagcttttctgcaaaaaatttgcggaagccttggggagcactgaagccaaggctgtaccgtaccaaaaatttgaggcacacccgaatgatctgtacgtggaaggactgccagaaaacattcctttccgaagtccctcatggtatggaatcccaaggctggaaaaaatcattcaagtgggcaatcgaattaaatttgttattaaaagaccagaacttctgactcacagtaccactgaagttactcagccaagaacgaatacaccaggttaacctcagcatgcttttgatttggtcaagcaatcaaagtactggtgaagaattgaagattggaagtgacacattttttgctcagggaagtaatggagaaagaaaaatcttcctggaggtagatcttcagtttggattagtctgaacatgatgaaacctgtagaaaccttcatttctcaagacaaagctcaaattcaaggttgtgaggaatgcagtcaccacttttgttaggggcagttgtgacagtgagtgactgcaaaaact

SEQ ID NO: 2040 - DNA, 1831 bp, Artificial
  cDNA Sequence
cacagggatcatggcccaagttgcaatgtccaccctccccgttgaagatgaggagtcctcggagagcaggatggtggtgacattcctcatgtcagctctcgagtccatgtgtaaagaactggccaagtccaaagccgaagtggcctgcattgcagtgtatgaaacagacgtgtttgtcgtcggaactgaaagaggacgtgcttttgtcaataccagaaaggattttcaaaaagattttgtaaaatattgtgttgaagaagaagaaaaagctgcagagatgcataaaatgaaatctacaacccaggcaaatcggatgagtgtagatgctgtagaaattgaaacactcagaaaaacagttgaggactatttctgcttttgctatgggaaagctttaggcaaatccacagtggtacctgtaccatatgagaagatgctgcgagaccagtcggctgtggtagtgcaggggcttccggaaggtgttgcctttaaacaccccgagaactatgatcttgcaaccctgaaatggattttggagaacaaagcagggatttcattcatcattaagagaccttttttagagccaaagaagcatgtaggtggtcgtgtgatggtaacagatgctgacaggtcaatactatctccaggtggaagttgtggccccatcaaagtgaaaactgaacccacagaagattctggcatttccctggaaatggcagctgtgacagtaaaggaagaatcagaagatcctgattattatcaatataacattcaaggaagccaccattcttcagagggcaatgaaggcacagaaatggaagtaccagcagaagatgatgattattctccaccgtctaagagaccaaaggccaatgagctaccgcagccaccagtcccggaacccgccaatgctgggaagcggaaagtgagggagttcaacttcgagaaatggaatgctcgcatcactgatctacgtaaacaagttgaagaattgtttgaaaggaaatatgctcaagccataaaagccaaaggtccggtgacgatcccgtaccctcttttccagtctcatgttgaagatctttatgtagaaggacttcctgaaggaattccttttagaaggccatctacttacggaattcctcgcctggagaggatattacttgcaaaggaaaggattcgttttgtgattaagaaacatgagcttctgaattcaacacgtgaagatttacagcttgataagccagcttcaggagtaaaggaagaatggtatgccagaatcactaaattaagaaagatggtggatcagcttttctgcaaaaaatttgcggaagccttggggagcactgaagccaaggctgtaccgtaccaaaaatttgaggcacacccgaatgatctgtacgtggaaggactgccagaaaacattcctttccgaagtccctcatggtatggaatcccaaggctggaaaaaatcattcaagtgggcaatcgaattaaatttgttattaaaagaccagaacttctgactcacagtaccactgaagttactcagccaagaacgaatacaccaggttaacctcagcatgcttttgatttggtcaagcaatcaaagtactggtgaagaattgaagattggaagtgacacattttttgctcagggaagtaatggagaaagaaaaatcttcctggaggtagatcttcagtttggattagtctgaacatgatgaaacctgtagaaaccttcatttctcaagacaaagctcaaattcaaggttgtgaggaatgcagtcaccacttttgttaggggcagttgtgacagtgagtgactgcaaaaact

SEQ ID NO: 2041 - DNA, 1646 bp, Artificial
  cDNA Sequence
cacagggatcatggcccaagttgcaatgtccaccctccccgttgaagatgaggagtcctcggagagcaggatggtggtgacattcctcatgtcagctctcgagtccatgtgtaaagaactggccaagtccaaagccgaagtggcctgcattgcagtgtatgaaacagacgtgtttgtcgtcggaactgaaagaggacgtgcttttgtcaataccagaaaggattttcaaaaagattttgtaaaatattgtgttgaagaagaagaaaaagctgcagagatgcataaaatgaaatctacaacccaggcaaatcggatgagtgtagatgctgtagaaattgaaacactcagaaaaacagttgaggactatttctgcttttgctatgggaaagctttaggcaaatccacagtggtacctgtaccatatgagaagatgctgcgagaccagtcggctgtggtagtgcaggggcttccggaaggtgttgcctttaaacaccccgagaactatgatcttgcaaccctgaaatggattttggagaacaaagcagggatttcattcatcattaagagaccttttttagagccaaagaagcatgtaggtggtcgtgtgatggtaacagatgctgacaggtcaatactatctccaggtggaagttgtggccccatcaaagtgaaaactgaacccacagaagattctggcatttccctggaaatggcagctgtgacagtaaaggaagaatcagaagatcctgattattatcaatataacattcaaggaagccaccattcttcagagggcaatgaaggcacagaaatggaagtaccagcagaagattctactcaacatgtcccttcagaaacaagtgaggaccctgaagttgaggtgactattgaagatgatgattattctccaccgtctaagagaccaaaggccaatgagctaccgcagccaccagtcccggaacccgccaatgctgggaagcggaaagtgagggagttcaacttcgagaaatggaatgctcgcatcactgatctacgtaaacaagttgaagaattgtttgaaaggaaatatgctcaagccataaaagccaaaggtccggtgacgatcccgtaccctcttttccagtctcatgttgaagatctttatgtagaaggacttcctgaaggaattccttttagaaggccatctacttacggaattcctcgcctggagaggatattacttgcaaaggaaaggattcgttttgtgattaagaaacatgagcttctgaattcaacacgtgaagatttacagcttgataagccagcttcaggagtaaaggaagaatggtatgccagaatcactaaattaagaaagatggtggatcagcttttctgcaaaaaatttgcggaagccttggggagcactgaagccaaggctgtaccgtaccaaaaatttgaggcacacccgaatgatctgtacgtggaaggactgccagaaaacattcctttccgaagtccctcatggtatggaatcccaaggctggaaaaaatcattcaagtgggcaatcgaattaaatttgttattaaaagaccagaacttctgactcacagtaccactgaagttactcagccaagaacgaatacaccaggtaaactagttgtgaaat

SEQ ID NO: 2042 - DNA, 1583 bp, Artificial
  cDNA Sequence
cacagggatcatggcccaagttgcaatgtccaccctccccgttgaagatgaggagtcctcggagagcaggatggtggtgacattcctcatgtcagctctcgagtccatgtgtaaagaactggccaagtccaaagccgaagtggcctgcattgcagtgtatgaaacagacgtgtttgtcgtcggaactgaaagaggacgtgcttttgtcaataccagaaaggattttcaaaaagattttgtaaaatattgtgttgaagaagaagaaaaagctgcagagatgcataaaatgaaatctacaacccaggcaaatcggatgagtgtagatgctgtagaaattgaaacactcagaaaaacagttgaggactatttctgcttttgctatgggaaagctttaggcaaatccacagtggtacctgtaccatatgagaagatgctgcgagaccagtcggctgtggtagtgcaggggcttccggaaggtgttgcctttaaacaccccgagaactatgatcttgcaaccctgaaatggattttggagaacaaagcagggatttcattcatcattaagagaccttttttagagccaaagaagcatgtaggtggtcgtgtgatggtaacagatgctgacaggtcaatactatctccaggtggaagttgtggccccatcaaagtgaaaactgaacccacagaagattctggcatttccctggaaatggcagctgtgacagtaaaggaagaatcagaagatcctgattattatcaatataacattcaaggaagccaccattcttcagagggcaatgaaggcacagaaatggaagtaccagcagaagatgatgattattctccaccgtctaagagaccaaaggccaatgagctaccgcagccaccagtcccggaacccgccaatgctgggaagcggaaagtgagggagttcaacttcgagaaatggaatgctcgcatcactgatctacgtaaacaagttgaagaattgtttgaaaggaaatatgctcaagccataaaagccaaaggtccggtgacgatcccgtaccctcttttccagtctcatgttgaagatctttatgtagaaggacttcctgaaggaattccttttagaaggccatctacttacggaattcctcgcctggagaggatattacttgcaaaggaaaggattcgttttgtgattaagaaacatgagcttctgaattcaacacgtgaagatttacagcttgataagccagcttcaggagtaaaggaagaatggtatgccagaatcactaaattaagaaagatggtggatcagcttttctgcaaaaaatttgcggaagccttggggagcactgaagccaaggctgtaccgtaccaaaaatttgaggcacacccgaatgatctgtacgtggaaggactgccagaaaacattcctttccgaagtccctcatggtatggaatcccaaggctggaaaaaatcattcaagtgggcaatcgaattaaatttgttattaaaagaccagaacttctgactcacagtaccactgaagttactcagccaagaacgaatacaccaggtaaactagttgtgaaat

SEQ ID NO: 2043 - DNA, 839 bp, Artificial
  cDNA Sequence
gtgtaaagaactggccaagtccaaagccgaagtggcctgcattgcagtgtatgaaacagacgtgtttgtcgtcggaactgaaagaggacgtgcttttgtcaataccagaaaggattttcaaaaagattttgtaaaatattgtgttgaagaagaagaaaaagctgcagagatgcataaaatgaaatctacaacccaggcaaatcggatgagtgtagatgctgtagaaattgaaacactcagaaaaacagttgaggactatttctgcttttgctatgggaaagctttaggcaaatccacagtggtacctgtaccatatgagaagatgctgcgagaccagtcggctgtggtagtgcaggggcttccggaaggtgttgcctttaaacaccccgagaactatgatcttgcaaccctgaaatggattttggagaacaaagcagggatttcattcatcattaagagaccttttttagagccaaagaagcatgtaggtggtcgtgtgatggtaacagatgctgacaggtcaatactatctccaggtggaagttgtggccccatcaaagtgaaaactgaacccacagaagattctggcatttccctggaaatggcagctgtgacagtaaaggaagaatcagaagatcctgattattatcaatataacattcaaggaagccaccattcttcagagggcaatgaaggcacagaaatggaagtaccagcagaagatgatgattattctccaccgtctaagagaccaaaggccaatgagctaccgcagccaccagtcccggaacccgccaatgctgggaagcggaaagtgagggagttcaacttcggtaagt

SEQ ID NO: 2044 - DNA, 1466 bp, Artificial
  cDNA Sequence
gaattaccaagctacggaagcaagtggaagagatttttaatttgaaatttgctcaagctcttggactcaccgaggcagtaaaagtaccatatcctgtgtttgaatcaaacccggagttcttgtatgtggaaggcttgccagaggggattcccttccgaagccctacctggtttggaattccacgacttgaaaggatcgtccgcgggagtaataaaatcaagttcgttgttaaaaaacctgaactagttatttcctacttgcctcctgggatggctagtaaaataaacactaaagctttgcagtcccccaaaagaccacgaagtcctgggagtaattcaaaggttcctgaaattgaggtcaccgtggaaggccctaataacaacaatcctcaaacctcagctgttcgaaccccgacccagactaacggttctaacgttcccttcaagccacgagggagagagttttcctttgaggcctggaatgccaaaatcacggacctaaaacagaaagttgaaaatctcttcaatgagaaatgtggggaagctcttggccttaaacaagctgtgaaggtgccgttcgcgttatttgagtctttcccggaagacttttatgtggaaggcttacctgagggtgtgccattccgaagaccatcgacttttggcattccgaggctggagaagatactcagaaacaaagccaaaattaagttcatcattaaaaagcccgaaatgtttgagacggcgattaaggagagcacctcctctaagagccctcccagaaaaataaattcatcacccaatgttaatactactgcatcaggtgttgaagaccttaacatcattcaggtgacaattccagatgatgataatgaaagactctcgaaagttgaaaaagctagacagctaagagaacaagtgaatgacctctttagtcggaaatttggtgaagctattggtatgggttttcctgtgaaagttccctacaggaaaatcacaattaaccctggctgtgtggtggttgatggcatgcccccgggggtgtccttcaaagcccccagctacctggaaatcagctccatgagaaggatcttagactctgccgagtttatcaaattcacggtcattagaccatttccaggacttgtgattaataaccagctggttgatcagagtgagtcagaaggccccgtgatacaagaatcagctgaaccaagccagttggaagttccagccacagaagaaataaaagagactgatggaagctctcagatcaagcaagaaccagaccccacgtggtagacctcttccctcctaggagccttgagttacggtgtttattttccaatcaagtgaagatatctcctacttctcctactggaacatctcagcttctgcagtgaagaaaaattcctgtgatagttcagttctttagtttttctatttgaaaaaaaaaaatcatttaaatga

SEQ ID NO: 2045 - DNA, 1736 bp, Artificial
  cDNA Sequence
gaattaccaagctacggaagcaagtggaagagatttttaatttgaaatttgctcaagctcttggactcaccgaggcagtaaaagtaccatatcctgtgtttgaatcaaacccggagttcttgtatgtggaaggcttgccagaggggattcccttccgaagccctacctggtttggaattccacgacttgaaaggatcgtccgcgggagtaataaaatcaagttcgttgttaaaaaacctgaactagttatttcctacttgcctcctgggatggctagtaaaataaacactaaagctttgcagtcccccaaaagaccacgaagtcctgggagtaattcaaaggttcctgaaattgaggtcaccgtggaaggccctaataacaacaatcctcaaacctcagctgttcgaaccccgacccagactaacggttctaacgttcccttcaagccacgagggagagagttttcctttgaggcctggaatgccaaaatcacggacctaaaacagaaagttgaaaatctcttcaatgagaaatgtggggaagctcttggccttaaacaagctgtgaaggtgccgttcgcgttatttgagtctttcccggaagacttttatgtggaaggcttacctgagggtgtgccattccgaagaccatcgacttttggcattccgaggctggagaagatactcagaaacaaagccaaaattaagttcatcattaaaaagcccgaaatgtttgagacggcgattaaggagagcacctcctctaagagccctcccagaaaaataaattcatcacccaatgttaatactactgcatcaggtgttgaagaccttaacatcattcaggtgacaattccagatgatgataatgaaagactctcgaaagttgaaaaagctagacagctaagagaacaagtgaatgacctctttagtcggaaatttggtgaagctattggtatgggttttcctgtgaaagttccctacaggaaaatcacaattaaccctggctgtgtggtggttgatggcatgcccccgggggtgtccttcaaagcccccagctacctggaaatcagctccatgagaaggatcttagactctgccgagtttatcaaattcacggtcattagaccatttccaggacttgtgattaataaccagctggttgatcagagtgagtcagaaggccccgtgatacaagaatcagctgaaccaagccagttggaagttccagccacagaagaaataaaagagactgatggaagctctcagatcaagcaagaaccagaccccacgtggtagacctcttccctcctaggcttaaagtatcagtggttgagaagagcttttcggacctgttactaccccaagctgtgtaatatacttgtataacagaaataccttctatacaaacctttttttctacttttagatagaaatgtctactttttcagcagttctgtgaattaaagagcagagtgactgtgggtctggaatggctggtgtacttgggaatgtactatcaggattttacagcaatgctgggaaatgacagggaaaatgacaggaatgaatctcaccagattttttatgtactcagcagagccttgagttacggtgtttattttccaatcaagtgaagatatctcctacttctcctactggaacatctcagcttctgcagtgaagaaaaattcctgtgatagttcagttctttagtttttctatttgaaaaaaaaa

SEQ ID NO: 2046 - DNA, 1474 bp, Artificial
  cDNA Sequence
gaattaccaagctacggaagcaagtggaagagatttttaatttgaaatttgctcaagctcttggactcaccgaggcagtaaaagtaccatatcctgtgtttgaatcaaacccggagttcttgtatgtggaaggcttgccagaggggattcccttccgaagccctacctggtttggaattccacgacttgaaaggatcgtccgcgggagtaataaaatcaagttcgttgttaaaaaacctgaactagttatttcctacttgcctcctgggatggctagtaaaataaacactaaagctttgcagtcccccaaaagaccacgaagtcctgggagtaattcaaaggttcctgaaattgaggtcaccgtggaaggccctaataacaacaatcctcaaacctcagctgttcgaaccccgacccagactaacggttctaacgttcccttcaagccacgagggagagagttttcctttgaggcctggaatgccaaaatcacggacctaaaacagaaagttgaaaatctcttcaatgagaaatgtggggaagctcttggccttaaacaagctgtgaaggtgccgttcgcgttatttgagtctttcccggaagacttttatgtggaaggcttacctgagggtgtgccattccgaagaccatcgacttttggcattccgaggctggagaagatactcagaaacaaagccaaaattaagttcatcattaaaaagcccgaaatgtttgagacggcgattaaggagagcacctcctctaagagccctcccagaaaaataaattcatcacccaatgttaatactactgcatcaggtgttgaagaccttaacatcattcaggtgacaattccagatgatgataatgaaagactctcgaaagttgaaaaagctagacagctaagagaacaagtgaatgacctctttagtcggaaatttggtgaagctattggtatgggttttcctgtgaaagttccctacaggaaaatcacaattaaccctggctgtgtggtggttgatggcatgcccccgggggtgtccttcaaagcccccagctacctggaaatcagctccatgagaaggatcttagactctgccgagtttatcaaattcacggtcattagaccatttccaggacttgtgattaataaccagctggttgatcagagtgagtcagaaggccccgtgatacaagaatcagctgaaccaagccagttggaagttccagccacagaagaaataaaagagactgatggaagctctcagatcaagcaagaaccagaccccacgtggtagacctcttccctcctaggcttaaagtatcagtggttgagaagagcttttcggacctgttactaccccaagctgtagccttgagttacggtgtttattttccaatcaagtgaagatatctcctacttctcctactggaacatctcagcttctgcagtgaagaaaaattcctgtgatag

SEQ ID NO: 2047 - DNA, 1684 bp, Artificial
  cDNA Sequence
gaattaccaagctacggaagcaagtggaagagatttttaatttgaaatttgctcaagctcttggactcaccgaggcagtaaaagtaccatatcctgtgtttgaatcaaacccggagttcttgtatgtggaaggcttgccagaggggattcccttccgaagccctacctggtttggaattccacgacttgaaaggatcgtccgcgggagtaataaaatcaagttcgttgttaaaaaacctgaactagttatttcctacttgcctcctgggatggctagtaaaataaacactaaagctttgcagtcccccaaaagaccacgaagtcctgggagtaattcaaaggttcctgaaattgaggtcaccgtggaaggccctaataacaacaatcctcaaacctcagctgttcgaaccccgacccagactaacggttctaacgttcccttcaagccacgagggagagagttttcctttgaggcctggaatgccaaaatcacggacctaaaacagaaagttgaaaatctcttcaatgagaaatgtggggaagctcttggccttaaacaagctgtgaaggtgccgttcgcgttatttgagtctttcccggaagacttttatgtggaaggcttacctgagggtgtgccattccgaagaccatcgacttttggcattccgaggctggagaagatactcagaaacaaagccaaaattaagttcatcattaaaaagcccgaaatgtttgagacggcgattaaggagagcacctcctctaagagccctcccagaaaaataaattcatcacccaatgttaatactactgcatcaggtgttgaagaccttaacatcattcaggtgacaattccagatgatgataatgaaagactctcgaaagttgaaaaagctagacagctaagagaacaagtgaatgacctctttagtcggaaatttggtgaagctattggtatgggttttcctgtgaaagttccctacaggaaaatcacaattaaccctggctgtgtggtggttgatggcatgcccccgggggtgtccttcaaagcccccagctacctggaaatcagctccatgagaaggatcttagactctgccgagtttatcaaattcacggtcattagaccatttccaggacttgtgattaataaccagctggttgatcagagtgagtcagaaggccccgtgatacaagaatcagctgaaccaagccagttggaagttccagccacagaagaaataaaagagactgatggaagctctcagatcaagcaagaaccagaccccacgtggtagacctcttccctcctagggtaaatcagcttctgtgtcagggatgctgtgtggtgtccatctgaaccccctgcatacgcgtagctaatgtgatctccccactttcacataagatggtggccctgccttcagggaatgtgggagccaggtgggagccttcccggatatttaagctagaagattctacagggagattctccttggatcaatatatgtctctcagtcaaagatgtaaaagcacttttgccttaaaaagaatgttctgtttctaaatagagtcaacgttgtcctcctcattggaattcactatgagtcagaatcattagactgacttttttttttccatagtaatagtattttgcagagtctcacagagctgcagatctttt

SEQ ID NO: 2048 - DNA, 1156 bp, Artificial
  cDNA Sequence
gaattaccaagctacggaagcaagtggaagagatttttaatttgaaatttgctcaagctcttggactcaccgaggcagtaaaagtaccatatcctgtgtttgaatcaaacccggagttcttgtatgtggaaggcttgccagaggggattcccttccgaagccctacctggtttggaattccacgacttgaaaggatcgtccgcgggagtaataaaatcaagttcgttgttaaaaaacctgaactagttatttcctacttgcctcctgggatggctagtaaaataaacactaaagctttgcagtcccccaaaagaccacgaagtcctgggagtaattcaaaggttcctgaaattgaggtcaccgtggaaggccctaataacaacaatcctcaaacctcagctgttcgaaccccgacccagactaacggttctaacgttcccttcaagccacgagggagagagttttcctttgaggcctggaatgccaaaatcacggacctaaaacagaaagttgaaaatctcttcaatgagaaatgtggggaagctcttggccttaaacaagctgtgaaggtgccgttcgcgttatttgagtctttcccggaagacttttatgtggaaggcttacctgagggtgtgccattccgaagaccatcgacttttggcattccgaggctggagaagatactcagaaacaaagccaaaattaagttcatcattaaaaagcccgaaatgtttgagacggcgattaaggagagcacctcctctaagagccctcccagaaaaataaattcatcacccaatgttaatactactgcatcaggtgttgaagaccttaacatcattcaggtgacaattccagatgatgataatgaaagactctcgaaagttgaaaaagctagacagctaagagaacaagtgaatgacctctttagtcggaaatttggtgaagctattggtatgggttttcctgtgaaagttccctacaggaaaatcacaattaaccctggctgtgtggtggttgatggcatgcccccgggggtgtccttcaaagcccccagctacctggaaatcagctccatgagaaggatcttagactctgccgagtttatcaaattcacggtcattagaccatttccaggacttgtgattaataaccg

SEQ ID NO: 2049 - DNA, 725 bp, Artificial
  cDNA Sequence
gaattaccaagctacggaagcaagtggaagagatttttaatttgaaatttgctcaagctcttggactcaccgaggcagtaaaagtaccatatcctgtgtttgaatcaaacccggagttcttgtatgtggaaggcttgccagaggggattcccttccgaagccctacctggtttggaattccacgacttgaaaggatcgtccgcgggagtaataaaatcaagttcgttgttaaaaaacctgaactagttatttcctacttgcctcctgggatggctagtaaaataaacactaaagctttgcagtcccccaaaagaccacgaagtcctgggagtaattcaaaggttcctgaaattgaggtcaccgtggaaggccctaataacaacaatcctcaaacctcagctgttcgaaccccgacccagactaacggttctaacgttcccttcaagccacgagggagagagttttcctttgaggcctggaatgccaaaatcacggacctaaaacagaaagttgaaaatctcttcaatgagaaatgtggggaagctcttggccttaaacaagctgtgaaggtgccgttcgcgttatttgagtctttcccggaagacttttatgtggaaggcttacctgagggtgtgccattccgaagaccatcgacttttggcattccgaggctggagaagatactcagaaacaaagccaaaattaagttcatcattaaaaagtaa

SEQ ID NO: 2050 - DNA, 1416 bp, Artificial
  cDNA Sequence
gctcaagctcttggactcaccgaggcagtaaaagtaccatatcctgtgtttgaatcaaacccggagttcttgtatgtggaaggcttgccagaggggattcccttccgaagccctacctggtttggaattccacgacttgaaaggatcgtccgcgggagtaataaaatcaagttcgttgttaaaaaacctgaactagttatttcctacttgcctcctgggatggctagtaaaataaacactaaagctttgcagtcccccaaaagaccacgaagtcctgggagtaattcaaaggttcctgaaattgaggtcaccgtggaaggccctaataacaacaatcctcaaacctcagctgttcgaaccccgacccagactaacggttctaacgttcccttcaagccacgagggagagagttttcctttgaggcctggaatgccaaaatcacggacctaaaacagaaagttgaaaatctcttcaatgagaaatgtggggaagctcttggccttaaacaagctgtgaaggtgccgttcgcgttatttgagtctttcccggaagacttttatgtggaaggcttacctgagggtgtgccattccgaagaccatcgacttttggcattccgaggctggagaagatactcagaaacaaagccaaaattaagttcatcattaaaaagcccgaaatgtttgagacggcgattaaggagagcacctcctctaagagccctcccagaaaaataaattcatcacccaatgttaatactactgcatcaggtgttgaagaccttaacatcattcaggtgacaattccagatgatgataatgaaagactctcgaaagttgaaaaagctagacagctaagagaacaagtgaatgacctctttagtcggaaatttggtgaagctattggtatgggttttcctgtgaaagttccctacaggaaaatcacaattaaccctggctgtgtggtggttgatggcatgcccccgggggtgtccttcaaagcccccagctacctggaaatcagctccatgagaaggatcttagactctgccgagtttatcaaattcacggtcattagaccatttccaggacttgtgattaataaccagctggttgatcagagtgagtcagaaggccccgtgatacaagaatcagctgaaccaagccagttggaagttccagccacagaagaaataaaagagactgatggaagctctcagatcaagcaagaaccagaccccacgtggtagacctcttccctcctaggagccttgagttacggtgtttattttccaatcaagtgaagatatctcctacttctcctactggaacatctcagcttctgcagtgaagaaaaattcctgtgatagttcagttctttagtttttctatttgaaaaaaaaaaatcatttaaatga

SEQ ID NO: 2051 - DNA, 1686 bp, Artificial
  cDNA Sequence
gctcaagctcttggactcaccgaggcagtaaaagtaccatatcctgtgtttgaatcaaacccggagttcttgtatgtggaaggcttgccagaggggattcccttccgaagccctacctggtttggaattccacgacttgaaaggatcgtccgcgggagtaataaaatcaagttcgttgttaaaaaacctgaactagttatttcctacttgcctcctgggatggctagtaaaataaacactaaagctttgcagtcccccaaaagaccacgaagtcctgggagtaattcaaaggttcctgaaattgaggtcaccgtggaaggccctaataacaacaatcctcaaacctcagctgttcgaaccccgacccagactaacggttctaacgttcccttcaagccacgagggagagagttttcctttgaggcctggaatgccaaaatcacggacctaaaacagaaagttgaaaatctcttcaatgagaaatgtggggaagctcttggccttaaacaagctgtgaaggtgccgttcgcgttatttgagtctttcccggaagacttttatgtggaaggcttacctgagggtgtgccattccgaagaccatcgacttttggcattccgaggctggagaagatactcagaaacaaagccaaaattaagttcatcattaaaaagcccgaaatgtttgagacggcgattaaggagagcacctcctctaagagccctcccagaaaaataaattcatcacccaatgttaatactactgcatcaggtgttgaagaccttaacatcattcaggtgacaattccagatgatgataatgaaagactctcgaaagttgaaaaagctagacagctaagagaacaagtgaatgacctctttagtcggaaatttggtgaagctattggtatgggttttcctgtgaaagttccctacaggaaaatcacaattaaccctggctgtgtggtggttgatggcatgcccccgggggtgtccttcaaagcccccagctacctggaaatcagctccatgagaaggatcttagactctgccgagtttatcaaattcacggtcattagaccatttccaggacttgtgattaataaccagctggttgatcagagtgagtcagaaggccccgtgatacaagaatcagctgaaccaagccagttggaagttccagccacagaagaaataaaagagactgatggaagctctcagatcaagcaagaaccagaccccacgtggtagacctcttccctcctaggcttaaagtatcagtggttgagaagagcttttcggacctgttactaccccaagctgtgtaatatacttgtataacagaaataccttctatacaaacctttttttctacttttagatagaaatgtctactttttcagcagttctgtgaattaaagagcagagtgactgtgggtctggaatggctggtgtacttgggaatgtactatcaggattttacagcaatgctgggaaatgacagggaaaatgacaggaatgaatctcaccagattttttatgtactcagcagagccttgagttacggtgtttattttccaatcaagtgaagatatctcctacttctcctactggaacatctcagcttctgcagtgaagaaaaattcctgtgatagttcagttctttagtttttctatttgaaaaaaaaa

SEQ ID NO: 2052 - DNA, 1424 bp, Artificial
  cDNA Sequence
gctcaagctcttggactcaccgaggcagtaaaagtaccatatcctgtgtttgaatcaaacccggagttcttgtatgtggaaggcttgccagaggggattcccttccgaagccctacctggtttggaattccacgacttgaaaggatcgtccgcgggagtaataaaatcaagttcgttgttaaaaaacctgaactagttatttcctacttgcctcctgggatggctagtaaaataaacactaaagctttgcagtcccccaaaagaccacgaagtcctgggagtaattcaaaggttcctgaaattgaggtcaccgtggaaggccctaataacaacaatcctcaaacctcagctgttcgaaccccgacccagactaacggttctaacgttcccttcaagccacgagggagagagttttcctttgaggcctggaatgccaaaatcacggacctaaaacagaaagttgaaaatctcttcaatgagaaatgtggggaagctcttggccttaaacaagctgtgaaggtgccgttcgcgttatttgagtctttcccggaagacttttatgtggaaggcttacctgagggtgtgccattccgaagaccatcgacttttggcattccgaggctggagaagatactcagaaacaaagccaaaattaagttcatcattaaaaagcccgaaatgtttgagacggcgattaaggagagcacctcctctaagagccctcccagaaaaataaattcatcacccaatgttaatactactgcatcaggtgttgaagaccttaacatcattcaggtgacaattccagatgatgataatgaaagactctcgaaagttgaaaaagctagacagctaagagaacaagtgaatgacctctttagtcggaaatttggtgaagctattggtatgggttttcctgtgaaagttccctacaggaaaatcacaattaaccctggctgtgtggtggttgatggcatgcccccgggggtgtccttcaaagcccccagctacctggaaatcagctccatgagaaggatcttagactctgccgagtttatcaaattcacggtcattagaccatttccaggacttgtgattaataaccagctggttgatcagagtgagtcagaaggccccgtgatacaagaatcagctgaaccaagccagttggaagttccagccacagaagaaataaaagagactgatggaagctctcagatcaagcaagaaccagaccccacgtggtagacctcttccctcctaggcttaaagtatcagtggttgagaagagcttttcggacctgttactaccccaagctgtagccttgagttacggtgtttattttccaatcaagtgaagatatctcctacttctcctactggaacatctcagcttctgcagtgaagaaaaattcctgtgatag

SEQ ID NO: 2053 - DNA, 1634 bp, Artificial
  cDNA Sequence
gctcaagctcttggactcaccgaggcagtaaaagtaccatatcctgtgtttgaatcaaacccggagttcttgtatgtggaaggcttgccagaggggattcccttccgaagccctacctggtttggaattccacgacttgaaaggatcgtccgcgggagtaataaaatcaagttcgttgttaaaaaacctgaactagttatttcctacttgcctcctgggatggctagtaaaataaacactaaagctttgcagtcccccaaaagaccacgaagtcctgggagtaattcaaaggttcctgaaattgaggtcaccgtggaaggccctaataacaacaatcctcaaacctcagctgttcgaaccccgacccagactaacggttctaacgttcccttcaagccacgagggagagagttttcctttgaggcctggaatgccaaaatcacggacctaaaacagaaagttgaaaatctcttcaatgagaaatgtggggaagctcttggccttaaacaagctgtgaaggtgccgttcgcgttatttgagtctttcccggaagacttttatgtggaaggcttacctgagggtgtgccattccgaagaccatcgacttttggcattccgaggctggagaagatactcagaaacaaagccaaaattaagttcatcattaaaaagcccgaaatgtttgagacggcgattaaggagagcacctcctctaagagccctcccagaaaaataaattcatcacccaatgttaatactactgcatcaggtgttgaagaccttaacatcattcaggtgacaattccagatgatgataatgaaagactctcgaaagttgaaaaagctagacagctaagagaacaagtgaatgacctctttagtcggaaatttggtgaagctattggtatgggttttcctgtgaaagttccctacaggaaaatcacaattaaccctggctgtgtggtggttgatggcatgcccccgggggtgtccttcaaagcccccagctacctggaaatcagctccatgagaaggatcttagactctgccgagtttatcaaattcacggtcattagaccatttccaggacttgtgattaataaccagctggttgatcagagtgagtcagaaggccccgtgatacaagaatcagctgaaccaagccagttggaagttccagccacagaagaaataaaagagactgatggaagctctcagatcaagcaagaaccagaccccacgtggtagacctcttccctcctagggtaaatcagcttctgtgtcagggatgctgtgtggtgtccatctgaaccccctgcatacgcgtagctaatgtgatctccccactttcacataagatggtggccctgccttcagggaatgtgggagccaggtgggagccttcccggatatttaagctagaagattctacagggagattctccttggatcaatatatgtctctcagtcaaagatgtaaaagcacttttgccttaaaaagaatgttctgtttctaaatagagtcaacgttgtcctcctcattggaattcactatgagtcagaatcattagactgacttttttttttccatagtaatagtattttgcagagtctcacagagctgcagatctttt

SEQ ID NO: 2054 - DNA, 1106 bp, Artificial
  cDNA Sequence
gctcaagctcttggactcaccgaggcagtaaaagtaccatatcctgtgtttgaatcaaacccggagttcttgtatgtggaaggcttgccagaggggattcccttccgaagccctacctggtttggaattccacgacttgaaaggatcgtccgcgggagtaataaaatcaagttcgttgttaaaaaacctgaactagttatttcctacttgcctcctgggatggctagtaaaataaacactaaagctttgcagtcccccaaaagaccacgaagtcctgggagtaattcaaaggttcctgaaattgaggtcaccgtggaaggccctaataacaacaatcctcaaacctcagctgttcgaaccccgacccagactaacggttctaacgttcccttcaagccacgagggagagagttttcctttgaggcctggaatgccaaaatcacggacctaaaacagaaagttgaaaatctcttcaatgagaaatgtggggaagctcttggccttaaacaagctgtgaaggtgccgttcgcgttatttgagtctttcccggaagacttttatgtggaaggcttacctgagggtgtgccattccgaagaccatcgacttttggcattccgaggctggagaagatactcagaaacaaagccaaaattaagttcatcattaaaaagcccgaaatgtttgagacggcgattaaggagagcacctcctctaagagccctcccagaaaaataaattcatcacccaatgttaatactactgcatcaggtgttgaagaccttaacatcattcaggtgacaattccagatgatgataatgaaagactctcgaaagttgaaaaagctagacagctaagagaacaagtgaatgacctctttagtcggaaatttggtgaagctattggtatgggttttcctgtgaaagttccctacaggaaaatcacaattaaccctggctgtgtggtggttgatggcatgcccccgggggtgtccttcaaagcccccagctacctggaaatcagctccatgagaaggatcttagactctgccgagtttatcaaattcacggtcattagaccatttccaggacttgtgattaataaccg

SEQ ID NO: 2055 - DNA, 675 bp, Artificial
  cDNA Sequence
gctcaagctcttggactcaccgaggcagtaaaagtaccatatcctgtgtttgaatcaaacccggagttcttgtatgtggaaggcttgccagaggggattcccttccgaagccctacctggtttggaattccacgacttgaaaggatcgtccgcgggagtaataaaatcaagttcgttgttaaaaaacctgaactagttatttcctacttgcctcctgggatggctagtaaaataaacactaaagctttgcagtcccccaaaagaccacgaagtcctgggagtaattcaaaggttcctgaaattgaggtcaccgtggaaggccctaataacaacaatcctcaaacctcagctgttcgaaccccgacccagactaacggttctaacgttcccttcaagccacgagggagagagttttcctttgaggcctggaatgccaaaatcacggacctaaaacagaaagttgaaaatctcttcaatgagaaatgtggggaagctcttggccttaaacaagctgtgaaggtgccgttcgcgttatttgagtctttcccggaagacttttatgtggaaggcttacctgagggtgtgccattccgaagaccatcgacttttggcattccgaggctggagaagatactcagaaacaaagccaaaattaagttcatcattaaaaagtaa

SEQ ID NO: 2056 - DNA, 1233 bp, Artificial
  cDNA Sequence
agacctgaactagttatttcctacttgcctcctgggatggctagtaaaataaacactaaagctttgcagtcccccaaaagaccacgaagtcctgggagtaattcaaaggttcctgaaattgaggtcaccgtggaaggccctaataacaacaatcctcaaacctcagctgttcgaaccccgacccagactaacggttctaacgttcccttcaagccacgagggagagagttttcctttgaggcctggaatgccaaaatcacggacctaaaacagaaagttgaaaatctcttcaatgagaaatgtggggaagctcttggccttaaacaagctgtgaaggtgccgttcgcgttatttgagtctttcccggaagacttttatgtggaaggcttacctgagggtgtgccattccgaagaccatcgacttttggcattccgaggctggagaagatactcagaaacaaagccaaaattaagttcatcattaaaaagcccgaaatgtttgagacggcgattaaggagagcacctcctctaagagccctcccagaaaaataaattcatcacccaatgttaatactactgcatcaggtgttgaagaccttaacatcattcaggtgacaattccagatgatgataatgaaagactctcgaaagttgaaaaagctagacagctaagagaacaagtgaatgacctctttagtcggaaatttggtgaagctattggtatgggttttcctgtgaaagttccctacaggaaaatcacaattaaccctggctgtgtggtggttgatggcatgcccccgggggtgtccttcaaagcccccagctacctggaaatcagctccatgagaaggatcttagactctgccgagtttatcaaattcacggtcattagaccatttccaggacttgtgattaataaccagctggttgatcagagtgagtcagaaggccccgtgatacaagaatcagctgaaccaagccagttggaagttccagccacagaagaaataaaagagactgatggaagctctcagatcaagcaagaaccagaccccacgtggtagacctcttccctcctaggagccttgagttacggtgtttattttccaatcaagtgaagatatctcctacttctcctactggaacatctcagcttctgcagtgaagaaaaattcctgtgatagttcagttctttagtttttctatttgaaaaaaaaaaatcatttaaatga

SEQ ID NO: 2057 - DNA, 1503 bp, Artificial
  cDNA Sequence
agacctgaactagttatttcctacttgcctcctgggatggctagtaaaataaacactaaagctttgcagtcccccaaaagaccacgaagtcctgggagtaattcaaaggttcctgaaattgaggtcaccgtggaaggccctaataacaacaatcctcaaacctcagctgttcgaaccccgacccagactaacggttctaacgttcccttcaagccacgagggagagagttttcctttgaggcctggaatgccaaaatcacggacctaaaacagaaagttgaaaatctcttcaatgagaaatgtggggaagctcttggccttaaacaagctgtgaaggtgccgttcgcgttatttgagtctttcccggaagacttttatgtggaaggcttacctgagggtgtgccattccgaagaccatcgacttttggcattccgaggctggagaagatactcagaaacaaagccaaaattaagttcatcattaaaaagcccgaaatgtttgagacggcgattaaggagagcacctcctctaagagccctcccagaaaaataaattcatcacccaatgttaatactactgcatcaggtgttgaagaccttaacatcattcaggtgacaattccagatgatgataatgaaagactctcgaaagttgaaaaagctagacagctaagagaacaagtgaatgacctctttagtcggaaatttggtgaagctattggtatgggttttcctgtgaaagttccctacaggaaaatcacaattaaccctggctgtgtggtggttgatggcatgcccccgggggtgtccttcaaagcccccagctacctggaaatcagctccatgagaaggatcttagactctgccgagtttatcaaattcacggtcattagaccatttccaggacttgtgattaataaccagctggttgatcagagtgagtcagaaggccccgtgatacaagaatcagctgaaccaagccagttggaagttccagccacagaagaaataaaagagactgatggaagctctcagatcaagcaagaaccagaccccacgtggtagacctcttccctcctaggcttaaagtatcagtggttgagaagagcttttcggacctgttactaccccaagctgtgtaatatacttgtataacagaaataccttctatacaaacctttttttctacttttagatagaaatgtctactttttcagcagttctgtgaattaaagagcagagtgactgtgggtctggaatggctggtgtacttgggaatgtactatcaggattttacagcaatgctgggaaatgacagggaaaatgacaggaatgaatctcaccagattttttatgtactcagcagagccttgagttacggtgtttattttccaatcaagtgaagatatctcctacttctcctactggaacatctcagcttctgcagtgaagaaaaattcctgtgatagttcagttctttagtttttctatttgaaaaaaaaa

SEQ ID NO: 2058 - DNA, 1241 bp, Artificial
  cDNA Sequence
agacctgaactagttatttcctacttgcctcctgggatggctagtaaaataaacactaaagctttgcagtcccccaaaagaccacgaagtcctgggagtaattcaaaggttcctgaaattgaggtcaccgtggaaggccctaataacaacaatcctcaaacctcagctgttcgaaccccgacccagactaacggttctaacgttcccttcaagccacgagggagagagttttcctttgaggcctggaatgccaaaatcacggacctaaaacagaaagttgaaaatctcttcaatgagaaatgtggggaagctcttggccttaaacaagctgtgaaggtgccgttcgcgttatttgagtctttcccggaagacttttatgtggaaggcttacctgagggtgtgccattccgaagaccatcgacttttggcattccgaggctggagaagatactcagaaacaaagccaaaattaagttcatcattaaaaagcccgaaatgtttgagacggcgattaaggagagcacctcctctaagagccctcccagaaaaataaattcatcacccaatgttaatactactgcatcaggtgttgaagaccttaacatcattcaggtgacaattccagatgatgataatgaaagactctcgaaagttgaaaaagctagacagctaagagaacaagtgaatgacctctttagtcggaaatttggtgaagctattggtatgggttttcctgtgaaagttccctacaggaaaatcacaattaaccctggctgtgtggtggttgatggcatgcccccgggggtgtccttcaaagcccccagctacctggaaatcagctccatgagaaggatcttagactctgccgagtttatcaaattcacggtcattagaccatttccaggacttgtgattaataaccagctggttgatcagagtgagtcagaaggccccgtgatacaagaatcagctgaaccaagccagttggaagttccagccacagaagaaataaaagagactgatggaagctctcagatcaagcaagaaccagaccccacgtggtagacctcttccctcctaggcttaaagtatcagtggttgagaagagcttttcggacctgttactaccccaagctgtagccttgagttacggtgtttattttccaatcaagtgaagatatctcctacttctcctactggaacatctcagcttctgcagtgaagaaaaattcctgtgatag

SEQ ID NO: 2059 - DNA, 1451 bp, Artificial
  cDNA Sequence
agacctgaactagttatttcctacttgcctcctgggatggctagtaaaataaacactaaagctttgcagtcccccaaaagaccacgaagtcctgggagtaattcaaaggttcctgaaattgaggtcaccgtggaaggccctaataacaacaatcctcaaacctcagctgttcgaaccccgacccagactaacggttctaacgttcccttcaagccacgagggagagagttttcctttgaggcctggaatgccaaaatcacggacctaaaacagaaagttgaaaatctcttcaatgagaaatgtggggaagctcttggccttaaacaagctgtgaaggtgccgttcgcgttatttgagtctttcccggaagacttttatgtggaaggcttacctgagggtgtgccattccgaagaccatcgacttttggcattccgaggctggagaagatactcagaaacaaagccaaaattaagttcatcattaaaaagcccgaaatgtttgagacggcgattaaggagagcacctcctctaagagccctcccagaaaaataaattcatcacccaatgttaatactactgcatcaggtgttgaagaccttaacatcattcaggtgacaattccagatgatgataatgaaagactctcgaaagttgaaaaagctagacagctaagagaacaagtgaatgacctctttagtcggaaatttggtgaagctattggtatgggttttcctgtgaaagttccctacaggaaaatcacaattaaccctggctgtgtggtggttgatggcatgcccccgggggtgtccttcaaagcccccagctacctggaaatcagctccatgagaaggatcttagactctgccgagtttatcaaattcacggtcattagaccatttccaggacttgtgattaataaccagctggttgatcagagtgagtcagaaggccccgtgatacaagaatcagctgaaccaagccagttggaagttccagccacagaagaaataaaagagactgatggaagctctcagatcaagcaagaaccagaccccacgtggtagacctcttccctcctagggtaaatcagcttctgtgtcagggatgctgtgtggtgtccatctgaaccccctgcatacgcgtagctaatgtgatctccccactttcacataagatggtggccctgccttcagggaatgtgggagccaggtgggagccttcccggatatttaagctagaagattctacagggagattctccttggatcaatatatgtctctcagtcaaagatgtaaaagcacttttgccttaaaaagaatgttctgtttctaaatagagtcaacgttgtcctcctcattggaattcactatgagtcagaatcattagactgacttttttttttccatagtaatagtattttgcagagtctcacagagctgcagatctttt

SEQ ID NO: 2060 - DNA, 923 bp, Artificial
  cDNA Sequence
agacctgaactagttatttcctacttgcctcctgggatggctagtaaaataaacactaaagctttgcagtcccccaaaagaccacgaagtcctgggagtaattcaaaggttcctgaaattgaggtcaccgtggaaggccctaataacaacaatcctcaaacctcagctgttcgaaccccgacccagactaacggttctaacgttcccttcaagccacgagggagagagttttcctttgaggcctggaatgccaaaatcacggacctaaaacagaaagttgaaaatctcttcaatgagaaatgtggggaagctcttggccttaaacaagctgtgaaggtgccgttcgcgttatttgagtctttcccggaagacttttatgtggaaggcttacctgagggtgtgccattccgaagaccatcgacttttggcattccgaggctggagaagatactcagaaacaaagccaaaattaagttcatcattaaaaagcccgaaatgtttgagacggcgattaaggagagcacctcctctaagagccctcccagaaaaataaattcatcacccaatgttaatactactgcatcaggtgttgaagaccttaacatcattcaggtgacaattccagatgatgataatgaaagactctcgaaagttgaaaaagctagacagctaagagaacaagtgaatgacctctttagtcggaaatttggtgaagctattggtatgggttttcctgtgaaagttccctacaggaaaatcacaattaaccctggctgtgtggtggttgatggcatgcccccgggggtgtccttcaaagcccccagctacctggaaatcagctccatgagaaggatcttagactctgccgagtttatcaaattcacggtcattagaccatttccaggacttgtgattaataaccg

SEQ ID NO: 2061 - DNA, 789 bp, Artificial
  cDNA Sequence
aggccctaataacaacaatcctcaaacctcagctgttcgaaccccgacccagactaacggttctaacgttcccttcaagccacgagggagagagttttcctttgaggcctggaatgccaaaatcacggacctaaaacagaaagttgaaaatctcttcaatgagaaatgtggggaagctcttggccttaaacaagctgtgaaggtgccgttcgcgttatttgagtctttcccggaagacttttatgtggaaggcttacctgagggtgtgccattccgaagaccatcgacttttggcattccgaggctggagaagatactcagaaacaaagccaaaattaagttcatcattaaaaagcccgaaatgtttgagacggcgattaaggagagcacctcctctaagagccctcccagaaaaataaattcatcacccaatgttaatactactgcatcaggtgttgaagaccttaacatcattcaggtgacaattccagatgatgataatgaaagactctcgaaagttgaaaaagctagacagctaagagaacaagtgaatgacctctttagtcggaaatttggtgaagctattggtatgggttttcctgtgaaagttccctacaggaaaatcacaattaaccctggctgtgtggtggttgatggcatgcccccgggggtgtccttcaaagcccccagctacctggaaatcagctccatgagaaggatcttagactctgccgagtttatcaaattcacggtcattagaccatttccaggacttgtgattaataaccg

SEQ ID NO: 2062 - DNA, 377 bp, Artificial
  cDNA Sequence
caaatgtatgttaaaatgcttttccaagggaacaacacatccttacattatttaaaccaatctgcttcattttcagagctggttgatcagagcgcgagccaccttgcccagccaagacttttttatcaggacaaaggattgtgcatttaaactatttcactagaactgggtggtggttttgctctctttcttctgggtgaattggatttgcaggttatgctgttgagtgatgacgcatagctgcttttgctccatttcccccagatgacttggtaaattctccgtgaatgactctgctacataacctagataacctaacgtgtgtcctttaaatgcatgtaagccagaagatgtatgttactttgaaaacataagta

SEQ ID NO: 2063 - DNA, 541 bp, Artificial
  cDNA Sequence
agaatcagctgaaccaagccagttggaagttccagccacagaagaaataaaagagactgatggaagctctcagatcaagcaagaaccagaccccacgtggtagacctcttccctcctaggcttaaagtatcagtggttgagaagagcttttcggacctgttactaccccaagctgtgtaatatacttgtataacagaaataccttctatacaaacctttttttctacttttagatagaaatgtctactttttcagcagttctgtgaattaaagagcagagtgactgtgggtctggaatggctggtgtacttgggaatgtactatcaggattttacagcaatgctgggaaatgacagggaaaatgacaggaatgaatctcaccagattttttatgtactcagcagagccttgagttacggtgtttattttccaatcaagtgaagatatctcctacttctcctactggaacatctcagcttctgcagtgaagaaaaattcctgtgatagttcagttctttagtttttctatttgaaaaaaaaa

SEQ ID NO: 2064 - DNA, 1181 bp, Artificial
  cDNA Sequence
catttaaggcgcagcctggaagtgccagggagcactggaggccacccagtcatgggggacaccttcatccgtcacatcgccctgctgggctttgagaagcgcttcgtacccagccagcactatgtgtacatgttcctggtgaaatggcaggacctgtcggagaaggtggtctaccggcgcttcaccgagatctacgagttccataaaaccttaaaagaaatgttccctattgaggcaggggcgatcaatccagagaacaggatcatcccccacctcccagctcccaagtggtttgacgggcagcgggccgccgagaaccgccagggcacacttaccgagtactgcggcacgctcatgagcctgcccaccaagatctcccgctgtccccacctcctcgacttcttcaaggtgcgccctgatgacctcaagctccccacggacaaccagacaaaaaagccagagacatacttgatgcccaaagatggcaagagtaccgcgacagacatcaccggccccatcatcctgcagacgtaccgcgccattgccaactacgagaagacctcgggctccgagatggctctgtccacgggggacgtggtggaggtcgtagagaagagcgagagcggtcagacctcccaccttacggggctccttcccctggtgctcaggaacccacagccacaagccccctgccaaggctcaggcagccttgcccctgggaggactccggctctgttaggggccctaaatgtcctccccacactgtgggtcgccttctgtcttagtgtgcaccctgtggtggctgtgggcatctgtgcttggcaggccggggcggggcatgtctgcgtgttctgtctggatgggtatgggaccgtctgttcattatgaagtgggctcagagctgtgattctgtgagcatgtgtgcatgcatgcatgtgacctcattgtccggtgtggtgaaggtgacatttccaaatctgagcattggacatcagtgtgtctgtgtccctgtgtcctcaccatccctgatggctgcagggagccgctgggccctgcccctcagtcacattcccgcacctctggcacaggttggtggttctgtcagatgaaagcaaagcgaggctggatcccagcgtccttcctcgagcccctggacagtcctgacgagacggaagaccctg

SEQ ID NO: 2065 - DNA, 551 bp, Artificial
  cDNA Sequence
tgctcgagggtgaagctgttgaggaaagacgacgtcacaggctacttcccgtccatgtacctgcaaaagtcagggcaagacgtgtcccaggcccaacgccagatcaagcggggggcgccgccccgcaggtcgtccatccgcaacgcgcacagcatccaccagcggtcgcggaagcgcctcagccaggacgcctatcgccgcaacagcgtccgttttctgcagcagcgacgccgccaggcgcggccgggaccgcagagccccgggagcccgctcgaggaggagcggcagacgcagcgctctaaaccgcagccggcggtgcccccgcggccgagcgccgacctcatcctgaaccgctgcagcgagagcaccaagcggaagctggcgtctgccgtctgaggctggagcgcagtccccagctagcgtctcggcccttgccgccccgtgcctgtacatacgtgttctatagagcctggcgtctggacgccgagggcagccccgacccctgtccagcgcggctcccgccaccctcaataaatgttgcttggagtgga

SEQ ID NO: 2066 - DNA, 674 bp, Artificial
  cDNA Sequence
acaagctcctggacggctggtgggtcatcagcaaatacctgtcccctgcggtgacctggatctgctaacctccacccctgcctagactgtggaaggattgctggaagggtctcagttgcacagaccaggaaactgaggcccacagaggcagacgacgtcacaggctacttcccgtccatgtacctgcaaaagtcagggcaagacgtgtcccaggcccaacgccagatcaagcggggggcgccgccccgcaggtcgtccatccgcaacgcgcacagcatccaccagcggtcgcggaagcgcctcagccaggacgcctatcgccgcaacagcgtccgttttctgcagcagcgacgccgccaggcgcggccgggaccgcagagccccgggagcccgctcgaggaggagcggcagacgcagcgctctaaaccgcagccggcggtgcccccgcggccgagcgccgacctcatcctgaaccgctgcagcgagagcaccaagcggaagctggcgtctgccgtctgaggctggagcgcagtccccagctagcgtctcggcccttgccgccccgtgcctgtacatacgtgttctatagagcctggcgtctggacgccgagggcagccccgacccctgtccagcgcggctcccgccaccctcaataaatgttgcttggagtgga

SEQ ID NO: 2067 - DNA, 542 bp, Artificial
  cDNA Sequence
ctgttgcaggaaagacgacgtcacaggctacttcccgtccatgtacctgcaaaagtcagggcaagacgtgtcccaggcccaacgccagatcaagcggggggcgccgccccgcaggtcgtccatccgcaacgcgcacagcatccaccagcggtcgcggaagcgcctcagccaggacgcctatcgccgcaacagcgtccgttttctgcagcagcgacgccgccaggcgcggccgggaccgcagagccccgggagcccgctcgaggaggagcggcagacgcagcgctctaaaccgcagccggcggtgcccccgcggccgagcgccgacctcatcctgaaccgctgcagcgagagcaccaagcggaagctggcgtctgccgtctgaggctggagcgcagtccccagctagcgtctcggcccttgccgccccgtgcctgtacatacgtgttctatagagcctggcgtctggacgccgagggcagccccgacccctgtccagcgcggctcccgccaccctcaataaatgttgcttggagtggaccgag

SEQ ID NO: 2068 - DNA, 472 bp, Artificial
  cDNA Sequence
gggcactttcccagtccccgaggcggatccggtgttgcatccttggagagagctgagagctggagtacagaacctgctaaggccatcaaacctattgatcggaagtcagtccatcagatttgctctgggccggtagtactgagtctaagcactgcggtgaagaagatggtagaaaacagtctggatgctggtgccactaatattgatctaaagcttaaggactatggaatggatctcattgaagtttcaggcaatggatgtggggtagaagaagaaaacttcgaaggcttaagtaatgatgtcaccatttctacctgccacgtatcggcgaaggttgggactcgactggtgtttgatcacgatgggaaaatcatccagaaaaccccctacccccaccccagagggaccacagtcagcgtgaagcagttattttctacgctacctgtgcgccataaggaatttcaaaggaata

SEQ ID NO: 2069 - DNA, 744 bp, Artificial
  cDNA Sequence
cggatccggtgttgcatccttggagagagctgagagctggagtacagaacctgctaaggccatcaaacctattgatcggaagtcagtccatcagatttgctctgggccggtagtactgagtctaagcactgcggtgaagaagatggtagaaaacagtctggatgctggtgccactaatattgatctaaagcttaaggactatggaatggatctcattgaagtttcaggcaatggatgtggggtagaagaagaaaacttcgaaggcttaatctctttcagctctgaaacatcacacatctaagattcaagagtttgccgacctaactcgggttgaaacttttggctttcggggggaagctctgagctcactttgtgcactgagtgatgtcaccatttctacctgccacgtatcggcgaaggttgggactcgactggtgtttgatcacgatgggaaaatcatccagaaaaccccctacccccaccccagagggaccacagtcagcgtgaagcagttattttctacgctacctgtgcgccataaggaatttcaaaggaatattaagaaggactcctagaagtaccccaccccacccctgctccttggaggacaacgtgatcactgtattcagctctgtcaagaatggtccaggttcttctagatgatctgcacaaatggttcctctcctccttcctgatgtctgccattagcattggaataaagttcctgctgaaaatccacatctc

SEQ ID NO: 2070 - DNA, 485 bp, Artificial
  cDNA Sequence
ttatatgattacagttttataaaaacaaaacaggcctaaatgtgtatagtataaagactgaagagtcagcacttccatgttctcagcggttatccttggatgtgagatctcatgcactttttgctctcttctttgtgcctttccattttgcatgcgtatttcttataatctaaaaagttacttaaacatatgcagctaaaaactttttttacttgtaaagcgtttggtgctaattttaacttttttttttagacggagtcttctcactctgtcgcccaggctggaagtgaaactccatcaaaaaaaaaaaaaagttgaactagatttggtctgatgcagttacagatttacaaaccgcgtcccaccctcctgccaacaccttccactcctcattcttgagggattagggatggaggtcatgcttctgtatcgacttcatgctgaccaggggcacttagtcccctaaagtgagaggaatgaaactc

SEQ ID NO: 2071 - DNA, 595 bp, Artificial
  cDNA Sequence
agaaagagaaaaaggagggcgagtggcgagcaggggcctcggccgccacccacacgccccgaagcgtgctcgtcccccgcgcggggctcccggccgccgccctcggccatcggctgctccccggtggcccaggcctcggactccgcggccggcccggcgcggcccagcgccctcagggatcatggcccaggtagcagtgtccaccctgcctgttgaagaagagtcctcctcagagaccaggatggtggtgacattcctcgtgtctgccctcgaatccatgtgtaaagaactggccaagtccaaggcagaagtggcctgcatcgcagtgtacgaaacagacgtgtttgtcgtcggaaccgagagaggatgcgcttttgttaatgccaggacggattttcagaaagattttgcaaaatactgtaggtgttttaattttatcctttgtattcccaatctcaaaaggatcgcaggcaagacttccacagtattttcttctaagctatcataagcattctcctagaaacgatcctaacacatcttcttggattcagcttaccaaataaatactgcctaacactgcagagtccaagacaaa

SEQ ID NO: 2072 - DNA, 397 bp, Artificial
  cDNA Sequence
attcttggtaaattctaaacttcaacttctgttttaaggaaacacaaattcatccagtgttacaaattctgcagcaggtgttgaagatcttaacatcgttcaagtgactgttccagataatgagaaggaaagattatcaagcattgaaaagattaaacagctaagagaacaagttaatgacctctttagccgaaaatttggtaagtttttatatctttttatatccagaattcatatacctaaaatacttctttttaaaagaatacttggccaggtgcattggctcatacctgtaatcctagcactttaggaggctaaggctagagaatcacttgagcccaggagtttgagaccagcctgggcagcaaagtgacaccccaggtctacaaaaggaaaa

SEQ ID NO: 2073 - DNA, 693 bp, Artificial
  cDNA Sequence
tttaaggcgcagcctggaagtgccagggagcactggaggccacccagtcatgggggacaccttcatccgtcacatcgccctgctgggctttgagaagcgcttcgtacccagccagcactatgtgagtacatgttcctggtgaaatggcaggacctgtcggagaaggtggtctaccggcgcttcaccgagatctacgagttccataaaaccttaaaagaaatgttccctattgaggcaggggcgatcaatccagagaacaggatcatcccccacctcccagctcccaagtggtttgacgggcagcgggccgccgagaaccaccagggcacacttaccgagtactgcagcacgctcatgagcctgcccaccaagatctcccgctgtccccacctccttgacttcttcaaggtgcgccctgatgacctcaagctccccacagacaaccagacaaaaaagccagagacatacttgatgcccaaagatggcaagagtaccgcgacagacatcaccggccccatcatcctgcagacgtaccgcgccattgccgactacgagaagacctcgggctccgagatggctctgtccacgggggacgtggtggaggtcgtggagaagagcgagagcggttggtggttctgtcagatgaaagcaaagcgaggctggatcccagcatccttcctcgagcccctggac

SEQ ID NO: 2074 - DNA, 586 bp, Artificial
  cDNA Sequence
cccagtcatgggggacaccttcatccgtcacatcgccctgctgggctttgagaagcgcttcgtacccagccagcactatgtacatgttcctggtgaaatggcaggacctgtcggagaaggtggtctaccggcgcttcaccgagatctacgagttccatgacaaaaaagccagagacatacttgatgcccaaagatggcaagagtaccgcgacagacatcaccggccccatcatcctgcagacgtaccgcgccattgccgactacgagaagacctcgggctccgagatggctctgtccacgggggacgtggtggaggtcgtggagaagagcgagagcggtcagacctcccaccttacggggctccttcccctggtgctcaggaacccacagccacaagccccctgccaaggctcaggcagcctggcccctgggaggactccagctctgttaggggccctaaatgtcctccccacactgtgggtcgccttctctcttagtgtgcaccctgtggtggctgtgggcatctgtgcatggcaggccggggcggggcatgtctgcgtgttctgtctggatgggtatgggaccg

SEQ ID NO: 2075 - DNA, 522 bp, Artificial
  cDNA Sequence
ggtggcacgggctgtgcagtgttaaacggtgacgatgcctggggagcctgtggacgtggcatgtggcgtggaccacatggtgaccctggccaagtcattcatctaaacctccctcacctgcttgggcggccccgtcccgggaaccactggcactccttggcagaggccagcgcgtggccagccccccggggttcttggatggtggtggcggaggaccctgcgtgcagtgtgacgctctgtcctgaatcccttagcgggtacctaccaggaggatcagggcaaggtccctctccagctgcaggtgaggcctgcggaactcagcttggatggcagcctttggtgggccgctgtggcccgcacgtctctgttctctccaagtaacatgcgacggtgtctggtgtcacgtctcgcctgagaagcccgtcttaggaaagcttagcttgaacacagtgctcgggaggtttctgctctgtctgtcatggcagtctcttggtttgtgtctggccaaggccatgcgtgtgc

SEQ ID NO: 2076 - DNA, 1240 bp, Artificial
  cDNA Sequence
caaccaggagtaaaagtggccgtagcctcttccggcgaggactggtgttaagggtcacgcaagatggcggcgcccagaggctgctgaggcgcggaacggaggatggcgctggtggcgttggtggctggggctcggctggggcggcggctgagcgggccggggctggggcgagggcactggacggcggccaggcgctcccggagccggcgcgaagcggcagaagccgaggcggaggtgcccgtggtccagtacgtgggcgagcgcgctgcccgcgccgatcgcgtcttcgtgtggggcttcagcttctcgggggcgctgggcgtgccttcctttgtggtgcccagctccgggcccgggccccgcgccggcgcccgaccgcgccgcaggatccagcccgtgccctatcgcctggagctggaccaaaagatttcatctgctgcttgcggctatggattcacactgctgtcctctaagactgcggatgttacgaaagtctgggggatgggactcaacaaagattctcagcttggatttcacaggagccggaaagataaaacgaggggctacgagtatgtgttggagccctcacccgtctccctgcctctggacagacctcaggagacacgggtgctgcaggtctcctgcggccgagctcactctcttgtgttgactgacagggaaggagtcttcagcatgggaaacaattcttatgggcaatgtggaagaaaggtggtcgaaaatgaaatttacagtgaaagtcacagagtccacaggatgcaggacttcgatggccaggtggtccaggtcgcctgtggtcaggatcatagtctgttcctgacggataaaggagaagtctattcttgtggatggggtgctgatgggcaaacaggtctgggtcactacaatatcaccagctcgcccaccaagctgggtggagacctggcgggagtgaacgttatccaagttgccacctacggtgattgctgcctggccgtgtccgccgacggaggactttttggttggggaaactcggagtacctgcagctggcctctgtcactgactccacacaggtgaatgtgccccgctgcttacacttctcaggagtggggaaggtgcgacaggctgcatgcggtggcacgggctgtgcagtgttaaacggagaaggacatgtttttgtctggggctatggaattcttgggaaaggtccaaacctagtggaaagtgccgtccctgaaatga

SEQ ID NO: 2077 - DNA, 891 bp, Artificial
  cDNA Sequence
caaccaggagtaaaagtggccgtagcctcttccggcgaggactggtgttaagggtcacgcaagatggcggcgcccagaggctgctgaggcgcggaacggaggatggcgctggtggcgttggtggctggggctcggctggggcggcggctgagcgggccggggctggggcgagggcactggacggcggccaggcgctcccggagccggcgcgaagcggcagaagccgaggcggaggtgcccgtggtccagtacgtgggcgagcgcgctgcccgcgccgatcgcgtcttcgtgtggggcttcagcttctcgggggcgctgggcgtgccttcctttgtggtgcccagctccgggcccgggccccgcgccggcgcccgaccgcgccgcaggatccagcccgtgccctatcgcctggagctggaccaaaagatttcatctgctgcttgcggctatggattcacactgctgtcctctaagactgcggatgttacgaaagtctgggggatgggactcaacaaagattctcagcttggatttcacaggagccggaaagataaaacgaggggctacgagtatgtgttggagccctcacccgtctccctgcctctggacagacctcaggagacacgggtgctgcaggtctcctgcggccgagctcactctcttgtgttgactgacagggaaggagtcttcagcatgggaaacaattcttatgggcaatgtggaagaaaggtggtcgaaaatgaaatttacagtgaaagtcacagagtccacaggatgcaggacttcgatggccaggtggtccaggtcgcctgtggtcaggatcatagtctgttcctgacggataaaggagaagtctattcttgtggatggggtgctgatgggcaaacaggt

SEQ ID NO: 2078 - DNA, 756 bp, Artificial
  cDNA Sequence
caaccaggagtaaaagtggccgtagcctcttccggcgaggactggtgttaagggtcacgcaagatggcggcgcccagaggctgctgaggcgcggaacggaggatggcgctggtggcgttggtggctggggctcggctggggcggcggctgagcgggccggggctggggcgagggcactggacggcggccaggcgctcccggagccggcgcgaagcggcagaagccgaggcggaggtgcccgtggtccagtacgtgggcgagcgcgctgcccgcgccgatcgcgtcttcgtgtggggcttcagcttctcgggggcgctgggcgtgccttcctttgtggtgcccagctccgggcccgggccccgcgccggcgcccgaccgcgccgcaggatccagcccgtgccctatcgcctggagctggaccaaaagatttcatctgctgcttgcggctatggattcacactgctgtcctctaagactgcggatgttacgaaagtctgggggatgggactcaacaaagattctcagcttggatttcacaggagccggaaagataaaacgaggggctacgagtatgtgttggagccctcacccgtctccctgcctctggacagacctcaggagacacgggtgctgcaggtctcctgcggccgagctcactctcttgtgttgactgacagggaaggagtcttcagcatgggaaacaattcttatgggcaatgtggaagaaaggtggtcgaaaatgaaatttacaggtga

SEQ ID NO: 2079 - DNA, 595 bp, Artificial
  cDNA Sequence
agaaagagaaaaaggagggcgagtggcgagcaggggcctcggccgccacccacacgccccgaagcgtgctcgtcccccgcgcggggctcccggccgccgccctcggccatcggctgctccccggtggcccaggcctcggactccgcggccggcccggcgcggcccagcgccctcagggatcatggcccaggtagcagtgtccaccctgcctgttgaagaagagtcctcctcagagaccaggatggtggtgacattcctcgtgtctgccctcgaatccatgtgtaaagaactggccaagtccaaggcagaagtggcctgcatcgcagtgtacgaaacagacgtgtttgtcgtcggaaccgagagaggatgcgcttttgttaatgccaggacggattttcagaaagattttgcaaaatactgtaggtgttttaattttatcctttgtattcccaatctcaaaaggatcgcaggcaagacttccacagtattttcttctaagctatcataagcattctcctagaaacgatcctaacacatcttcttggattcagcttaccaaataaacactgcttaacactgcagagtccaagacaaa

SEQ ID NO: 2080 - DNA, 436 bp, Artificial
  cDNA Sequence
ccgactggtctcgcagcatcttctcatatggtacaggtaccactgtggatttgcctaaagctttccctggggcagatgaaaagcggatgaacatcattcaatgtgcaggcctacccaactatggaatgatggaacagaaggcctcaccatggactcgagagctgacatgaggaatgtcaccaccatcctgctctccgaggactcctcatcttcaacggggagggtggacattgcaacttgggccatgatccctgtgcaggagaagtaagaagaaagtgagtggtagaaatctggtgtcctgaacccacagccaaagctgtgagggcccctcaccggctgcctaatttacagttttcttgctctagagacaaaataaggctcagaaactaagtatttgacttgcccaaaccctcataagataaagaatctatcccct

SEQ ID NO: 2081 - DNA, 1291 bp, Artificial
  cDNA Sequence
ggtggcgggaagaggaggcgcgagaatggaggtggaggccgtctgtggtggcgcgggcgaggtggaggcccaggactctgaccctgcccctgccttcagcaaggcccccggcagcgccggccactacgaactgccgtgggttgaaaaatataggccagtaaagctgaatgaaattgtcgggaatgaagacaccgtgagcaggctagaggtctttgcaagggaaggaaatgtgcccaacatcatcattgcgggccctccaggaaccggcaagaccacaagcattctgtgcttggcccgggccctgctgggcccagcactcaaagatgccatgttggaactcaatgcttcaaatgacaggggcattgacgttgtgaggaataaaattaaaatgtttgctcaacaaaaagtcactcttcccaaaggccgacataagatcatcattctggatgaagcagacagcatgaccgacggagcccagcaagccttgaggagaaccatggaaatctactctaaaaccactcgcttcgcccttgcttgtaatgcttcggataagatcatcgagcccattcagtcccgctgtgcagtcctccggtacacaaagctgaccgacgcccagatcctcaccaggctgatgaatgttatcgagaaggagagggtaccctacactgatgacggcctagaagccatcatcttcacggcccagggagacatgaggcaggcgctgaacaacctgcagtccaccttctcaggatttggcttcattaacagtgagaacgtgttcaaggtctgtgacgagccccacccactgctggtaaaggagatgatccagcactgtgtgaatgccaacattgacgaagcctacaagattcttgctcacttgtggcatctgggctactcaccagaagatatcattggcaacatctttcgagtgtgtaaaactttccaaatggcagaatacctgaaactggagtttatcaaggaaattggatacactcacatgaaaatagcggaaggagtgaactctcttttgcagatggcaggcctcctggcaaggctgtgtcagaagacaatggccccggtggccagttagagcagagacttcactgactgacttacaggtgccctattctgaggtacaggagccgcggctttctgatgggggaaaatgccgccttaggctggagccaacatgactgtcctttaaactccagtggctggccaggcacggtagctcacgcctgtaatcccaacactttgggaggccgaggcaggtggatcacctgaggtcaga

SEQ ID NO: 2082 - DNA, 948 bp, Artificial
  cDNA Sequence
ggaagaggaggcgcgagaatggaggtggaggccgtctgtggtggcgcgggcgaggtggaggcccaggactctgaccctgcccctgccttcagcaaggcccccggcagcgccggccactacgaactgccgtgggttgaaaaatataggccagtaaagctgaatgaaattgtcgggaatgaagacaccgtgagcaggctagaggtctttgcaagggaaggaaatgtgcccaacatcatcattgcgggccctccaggaaccggcaagaccacaagcattctgtgcttggcccgggccctgctgggcccagcactcaaagatgccatgttggaactcaatgcttcaaatgacagcatgaccgacggagcccagcaagccttgaggagaaccatggaaatctactctaaaaccactcgcttcgcccttgcttgtaatgcttcggataagatcatcgagcccattcagtcccgctgtgcagtcctccggtacacaaagctgaccgacgcccagatcctcaccaggctgatgaatgttatcgagaaggagagggtaccctacactgatgacggcctagaagccatcatcttcacggcccagggagacatgaggcaggcgctgaacaacctgcagtccaccttctcaggatttggcttcattaacagtgagaacgtgttcaaggtctgtgacgagccccacccactgctggtaaaggagatgatccagcactgtgtgaatgccaacattgacgaagcctacaagattcttgctcacttgtggcatctgggctactcaccagaagatatcattggcaacatctttcgagtgtgtaaaactttccaaatggcagaatacctgaaactggagtttatcaaggaaattggatacactcacatgaaaatagcggaaggagtgaactctcttttgcagatggcaggcctcctggcaaggctg

SEQ ID NO: 2083 - DNA, 1276 bp, Artificial
  cDNA Sequence
gaagaggaggcgcgagaatggaggtggaggccgtctgtggtggcgcgggcgaggtggaggcccaggactctgaccctgcccctgccttcagcaaggcccccggcagcgccggccactacgaactgccgtgggttgaaaaatataggccagtaaagctgaatgaaattgtcgggaatgaagacaccgtgagcaggctagaggtgaggaaggaaatgtgcccaacatcatcattgcgggccctccaggaaccggcaagaccacaagcattctgtgcttggcccgggccctgctgggcccagcactcaaagatgccatgttggaactcaatgcttcaaatgacaggggcattgacgttgtgaggaataaaattaaaatgtttgctcaacaaaaagtcactcttcccaaaggccgacataagatcatcattctggatgaagcagacagcatgaccgacggagcccagcaagccttgaggagaaccatggaaatctactctaaaaccactcgcttcgcccttgcttgtaatgcttcggataagatcatcgagcccattcagtcccgctgtgcagtcctccggtacacaaagctgaccgacgcccagatcctcaccaggctgatgaatgttatcgagaaggagagggtaccctacactgatgacggcctagaagccatcatcttcacggcccagggagacatgaggcaggcgctgaacaacctgcagtccaccttctcaggatttggcttcattaacagtgagaacgtgttcaaggtctgtgacgagccccacccactgctggtaaaggagatgatccagcactgtgtgaatgccaacattgacgaagcctacaagattcttgctcacttgtggcatctgggctactcaccagaagatatcattggcaacatctttcgagtgtgtaaaactttccaaatggcagaatacctgaaactggagtttatcaaggaaattggatacactcacatgaaaatagcggaaggagtgaactctcttttgcagatggcaggcctcctggcaaggctgtgtcagaagacaatggccccggtggccagttagagcagagacttcactgactgacttacaggtgccctattctgaggtacaggagccgcggctttctgatgggggaaaatgccgccttaggctggagccaacatgactgtcctttaaactccagtggctggccaggcacggtagctcacgcctgtaatcccaacactttgggaggccgaggcaggtggatcacctgaggtcaga

SEQ ID NO: 2084 - DNA, 1374 bp, Artificial
  cDNA Sequence
gcgagaatggaggtggaggccgtctgtggtggcgcgggcgaggtggaggcccaggactctgaccctgcccctgccttcagcaaggcccccggcagcgccggccactacgaactgccgtgggttgaaaaatataggccagtaaagctgaatgaaattgtcgggaatgaagacaccgtgagcaggctagaggtctttgcaagggaaggaaatgtgcccaacatcatcattgcggggtcagaggtgacggagatgcaaacagcagtgaacataactcaagagctacctgaggtccttctggtggtttgaagtctttactggagatctcattcccagggccctccaggaaccggcaagaccacaagcattctgtgcttggcccgggccctgctgggcccagcactcaaagatgccatgttggaactcaatgcttcaaatgacaggggcattgacgttgtgaggaataaaattaaaatgtttgctcaacaaaaagtcactcttcccaaaggccgacataagatcatcattctggatgaagcagacagcatgaccgacggagcccagcaagccttgaggagaaccatggaaatctactctaaaaccactcgcttcgcccttgcttgtaatgcttcggataagatcatcgagcccattcagtcccgctgtgcagtcctccggtacacaaagctgaccgacgcccagatcctcaccaggctgatgaatgttatcgagaaggagagggtaccctacactgatgacggcctagaagccatcatcttcacggcccagggagacatgaggcaggcgctgaacaacctgcagtccaccttctcaggatttggcttcattaacagtgagaacgtgttcaaggtctgtgacgagccccacccactgctggtaaaggagatgatccagcactgtgtgaatgccaacattgacgaagcctacaagattcttgctcacttgtggcatctgggctactcaccagaagatatcattggcaacatctttcgagtgtgtaaaactttccaaatggcagaatacctgaaactggagtttatcaaggaaattggatacactcacatgaaaatagcggaaggagtgaactctcttttgcagatggcaggcctcctggcaaggctgtgtcagaagacaatggccccggtggccagttagagcagagacttcactgactgacttacaggtgccctattctgaggtacaggagccgcggctttctgatgggggaaaatgccgccttaggctggagccaacatgactgtcctttaaactccagtggctggccaggcacggtagctcacgcctgtaatcccaacactttgggaggccgaggcaggtggatcacctgaggtcaga

SEQ ID NO: 2085 - DNA, 1222 bp, Artificial
  cDNA Sequence
ggccactacgaactgccgtgggttgaaaaatataggccagtaaagctgaatgaaattgtcgggaatgaagacaccgtgagcaggctagagtcatccagaagcaagttttaaccggttttaatgatcattttcgccgtaggtctttgcaagggaaggaaatgtgcccaacatcatcattgcgggccctccaggaaccggcaagaccacaagcattctgtgcttggcccgggccctgctgggcccagcactcaaagatgccatgttggaactcaatgcttcaaatgacaggggcattgacgttgtgaggaataaaattaaaatgtttgctcaacaaaaagtcactcttcccaaaggccgacataagatcatcattctggatgaagcagacagcatgaccgacggagcccagcaagccttgaggagaaccatggaaatctactctaaaaccactcgcttcgcccttgcttgtaatgcttcggataagatcatcgagcccattcagtcccgctgtgcagtcctccggtacacaaagctgaccgacgcccagatcctcaccaggctgatgaatgttatcgagaaggagagggtaccctacactgatgacggcctagaagccatcatcttcacggcccagggagacatgaggcaggcgctgaacaacctgcagtccaccttctcaggatttggcttcattaacagtgagaacgtgttcaaggtctgtgacgagccccacccactgctggtaaaggagatgatccagcactgtgtgaatgccaacattgacgaagcctacaagattcttgctcacttgtggcatctgggctactcaccagaagatatcattggcaacatctttcgagtgtgtaaaactttccaaatggcagaatacctgaaactggagtttatcaaggaaattggatacactcacatgaaaatagcggaaggagtgaactctcttttgcagatggcaggcctcctggcaaggctgtgtcagaagacaatggccccggtggccagttagagcagagacttcactgactgacttacaggtgccctattctgaggtacaggagccgcggctttctgatgggggaaaatgccgccttaggctggagccaacatgactgtcctttaaactccagtggctggccaggcacggtagctcacgcctgtaatcccaacactttgggaggccgaggcaggtggatcacctgaggtcaga

SEQ ID NO: 2086 - DNA, 983 bp, Artificial
  cDNA Sequence
aggtctttgcaagggaaggaaatgtgcccaacatcatcattgcgggccctccaggaaccggcaagaccacaagcattctgtgcttggcccgggccctgctgggcccagcactcaaagatgccatgttggaactcaatgcttcaaatgacagcatgaccgacggagcccagcaagccttgaggagaaccatggaaatctactctaaaaccactcgcttcgcccttgcttgtaatgcttcggataagatcatcgagcccattcagtcccgctgtgcagtcctccggtacacaaagctgaccgacgcccagatcctcaccaggctgatgaatgttatcgagaaggagagggtaccctacactgatgacggcctagaagccatcatcttcacggcccagggagacatgaggcaggcgctgaacaacctgcagtccaccttctcaggatttggcttcattaacagtgagaacgtgttcaaggtctgtgacgagccccacccactgctggtaaaggagatgatccagcactgtgtgaatgccaacattgacgaagcctacaagattcttgctcacttgtggcatctgggctactcaccagaagatatcattggcaacatctttcgagtgtgtaaaactttccaaatggcagaatacctgaaactggagtttatcaaggaaattggatacactcacatgaaaatagcggaaggagtgaactctcttttgcagatggcaggcctcctggcaaggctgtgtcagaagacaatggccccggtggccagttagagcagagacttcactgactgacttacaggtgccctattctgaggtacaggagccgcggctttctgatgggggaaaatgccgccttaggctggagccaacatgactgtcctttaaactccagtggctggccaggcacggtagctcacgcctgtaatcccaacactttgggaggccgaggcaggtggatcacctgaggtcaga

SEQ ID NO: 2087 - DNA, 212 bp, Artificial
  cDNA Sequence
cagccacgccttccacctgctgtgcctcctggccatgtactgcaacggcaataagggccctgagcaccccaatcccggaaagccgttcactgccagagggtttccccgccagtgctaccttccagacaacgcccagggccgcaaggtgagtgccaccatgcgccccgggggtggacggggccctgaccaggcggcaggaggccaggcgccac

SEQ ID NO: 2088 - DNA, 617 bp, Artificial
  cDNA Sequence
gcagttattttctacgctacctgtgcgccataaggaatttcaaaggaatattaagaagaatcgtgaaaaatggaagacagtagcacagacacagaaaaagaagaggaagaggagaaagatgaaaaggatcaagagcccatttatgccatagtgcccacaattaacattcaagatgagcggtttgttgatttatctgaaactccagctttcatttttctgcatgagatgccctggggatggagcatgcctgagatactgtctctaaatgaaagtgatctccgccctgtcctttcaacctcacgttcatggtaagtagaggtccaaatgcggagatggctttccaaagtatgagacagtcagcaacagtggtcccagtgactcaggtgaaaagccaaggtttggagagtcaataccactgttagttcgtgggtggagtaggcgattaagtctgtggaatttcacatgtatttattaaagttaattcaagtaatttggatggtgaggatgggttctacttctatctgcttgaattctaacttcaggtaaaagagaaagaaatatgaataccttcccttagtggcatgctaaaactctccccttaaaatattttttgtgcc

SEQ ID NO: 2089 - DNA, 451 bp, Artificial
  cDNA Sequence
cctaaataaggatcaggaccaagggaagggagtgaggctcagtgtcatcaaggaacagccaatccaatgagattgacatgagaaatgatacatattcagcagaagatcagaccttaaaagcatgacaattgcagttatcttctctggcaagagaagagttgaagacactcctaaatagccacatatgtattaattttattttagaatcgtgaaaaatggaagacagtagcacagacacagaaaaagaagaggaagaggagaaagatgaaaaggatcaagagcccatttatgccatagtgcccacaattaacattcaagatgagcggtttgttgatttatctgaaactccagctttcatttttctgcatgaggtatatttttctttatatgttactacagtaaaacccaactcaacatgtacttaaaaattcaaatgaagccaatatcatta

SEQ ID NO: 2090 - DNA, 462 bp, Artificial
  cDNA Sequence
tcagctctgaaacatcacacatctaagattcaagagtttgccgacctaactcgggttgaaacttttggctttcgggggaaagctctgagctcactttgtgcactgagtgatgtcaccatttctacctgccacgtatcggcgaaggttgggactcgactggtgtttgatcacgatgggaaaatcatccagaaaaccccctacccccaccccagagggaccacagtcagcgtgaagcagttattttctacgctacctgtgcgccataaggaatttcaaaggaatattaagaaggactcctagaagtaccccaccccacccctgctccttggaggacaacgtgatcactgtattcagctccatcaagaatggtccaggttcttctagatgatctgcacaaatggttcctctcctccttcctgatgtctgccattagcattggaataaagttcctgctgaaaatcc

SEQ ID NO: 2091 - DNA, 1092 bp, Artificial
  cDNA Sequence
aacgagccttacttgaaatcaaagaacgagaacataaccaattggtcaagctattggaattagccagagagaatgaagcaacttcattaactgaaagagggatcttggatctcaatttacgcaacagtctcattgacaagcagaactaccatgatgaactttctcgtaagcaaagagagaaagaacgagattttcgaaatttaagaaagatggaactgctcttgaaagtgtcctgggatgcacttaggcaaactcaagcactgcatcaaaggcttctattagagatggaagctatccccaaagatgattctacattatctgagagaaggcgagagcttcacaaggaagttgaagtagctaagaggaatttggcccaacagaaaattatatcagaaatggagtctaagttagtagaacaacaacttgcagaagaaaacaagcttttaaaggagcaagaaaacatgaaagagctagtagtcaaccttctccgcatgactcaaatcaaaattgatgaaaaggaacaaaagtccaaggatttcctgaaagctcagcaaaaatacaccaacattgttaaagaaatgaaagcaaaggatcttgaaatcaggatacacaagaagaaaaaatgtgaaatttatcggagactgagagagtttgctaaactgtatgacaccattcgaaatgaaagaaacaaatttgttaacttactccacaaagctcatcagaaagtaaatgaaataaaagaaaggcataaaatgtcattaaatgaacttgaaattctgagaaatagtgccgttagtcaagaaagaaagctacaaaattccatgctgaaacacgccaacaatgttaccatcagagagagcatgcaaaacgatgtgcgcaaaattgtatcaaaacttcaggaaatgaaagaaaagaaggaagcccagttaaataacattgacagacttgccaacacgatcacaatgatcgaagaggagatggtgcagcttcgcaaaagatacgaaaaagctgttcagcatcgaaatgaaagtggcgttcagctgatagagcgggaagaagaaatatgcattttttatgaaaaaataaatatcc

SEQ ID NO: 2092 - DNA, 1717 bp, Artificial
  cDNA Sequence
gagggaaccacaatgactagtaaaacggtggtctcaatgcccacttagcctctgcctctgaatttgaccatagtggcgttcagctgatagagcgggaagaagaaatatgcattttttatgaaaaaataaatatccaagagaagatgaaactaaatggagaaattgaaatacatctactggaagaaaagatccaattcctgaaaatgaagattgctgagaagcaaagacaaatttgtgtgacccagaaattactgccagccaagaggtccctggatgccgacctagctgtgctccaaattcagttttcacagtgtacagacagaattaaagacctggagaaacagttcgtaaagcctgatggtgagaatagagctcgcttccttccagggaaagatctgaccgaaaaagaaatgatccaaaaattagacaagctggaactacaactggccaagaaggaggagaagctgctggagaaggatttcatctatgagcaggtctccaggctcacagacaggctctgcagcaaaactcagggctgcaagcaggacacactgctcttagccaagaagatgaatggctatcaaagaaggatcaaaaatgcaactgagaaaatgatggctcttgttgctgagctgtccatgaaacaagccctaaccattgaactccaaaaggaagtcagggagaaagaagacttcatcttcacttgcaattccaggatagaaaaaggtctgccactcaataaggaaattgagaaagaatggttgaaagtccttcgagatgaagaaatgcacgccttggccatcgctgaaaagtctcaggagttcttggaagcagataatcgccagctgcccaatggtgtttacacaactgcagagcagcgtccgaatgcctacatcccagaagcagatgccactcttcctttgccaaaaccttatggtgctttggctccttttaaacccagtgaacctggagccaatatgaggcacataaggaaacctgttataaagccagttgaaatctgaatatgtgaacaaatccaggcctctcaaggaaaagacttcaaccaggcttccttgtacccacaggtgaaaaatgagtgagaacacgtcagaaatgtggaaggtaaaggttttatcggtgacttttcacgtcaaggatataatgcaatacagttaagagcatcagagagaagaaatatactttccaggtaatcagaacacctagattttttttaaagttttaagaaatattttattctgaaacaattacagattcacaggaaactgcgagtcaactatatactacacacaacaacactaatctacatgcagcgatactagagagagatgcaatgtaccctccacccagtctcctcagtgcttatatcttacctaactagagcacaatatcaaaatcaaaaattgacattggcacaatgtgtgtgtgtcattctatgtcattttatcatgtttagattcatgtcccacaatgtaccaccacaatcaacacatagaagtcttcgatcacccccaaagatttccctgggtcacccctggacagtgagtcacgtccactattctccctccaactaccccaacccctaatgaccactaagttgggaacacctagattttttaatatcaatttttaactacataagtaacctgagaacacatctgagacatggatattaatcatacttctactatgaatgtgc

SEQ ID NO: 2093 - DNA, 1377 bp, Artificial
  cDNA Sequence
gagggaaccacaatgactagtaaaacggtggtctcaatgcccacttagcctctgcctctgaatttgaccatagtggcgttcagctgatagagcgggaagaagaaatatgcattttttatgaaaaaataaatatccaagagaagatgaaactaaatggagaaattgaaatacatctactggaagaaaagatccaattcctgaaaatgaagattgctgagaagcaaagacaaatttgtgtgacccagaaattactgccagccaagaggtccctggatgccgacctagctgtgctccaaattcagttttcacagtgtacagacagaattaaagacctggagaaacagttcgtaaagcctgatggtgagaatagagctcgcttccttccagggaaagatctgaccgaaaaagaaatgatccaaaaattagacaagctggaactacaactggccaagaaggaggagaagctgctggagaaggatttcatctatgagcaggtctccaggctcacagacaggctctgcagcaaaactcagggctgcaagcaggacacactgctcttagccaagaagatgaatggctatcaaagaaggatcaaaaatgcaactgagaaaatgatggctcttgttgctgagctgtccatgaaacaagccctaaccattgaactccaaaaggaagtcagggagaaagaagacttcatcttcacttgcaattccaggatagaaaaaggtctgccactcaataaggaaattgagaaagaatggttgaaagtccttcgagatgaagaaatgcacgccttggccatcgctgaaaagtctcaggagttcttggaagcagataatcgccagctgcccaatggtgtttacacaactgcagagcagcgtccgaatgcctacatcccagaagcagatgccactcttcctttgccaaaaccttatggtgctttggctccttttaaacccagtgaacctggagccaatatgaggcacataaggaaacctgttataaagccagttgaaatctgaatatgtgaacaaatccaggcctctcaaggaaaagacttcaaccaggcttccttgtacccacaggtgaaaaatgtgagcataatacttctaatattattgataagtaaggtaaccacaattagtcagcaacagagtacaacagggtttctatttacccaccaactactatacctttcatgacgttgaatgggacatagaactgtcctacatttatgtcaaagtatatatttgaatcgcttatattttctttttcactctttatattgagtacattccagaaatttgtagtaggcaaggtgctataaaaatgcactaaaaataaatctgttctcaatgaagtacggaaatggacaca

SEQ ID NO: 2094 - DNA, 608 bp, Artificial
  cDNA Sequence
gggcgggcgggcggcgggggggccagcgaccgcagccggggggacgcgggaggatggagcaagtggagatcctgaggaaattcatccagagggtccaggccatgaagagtcctgaccacaatggggaggacaacttcgcccgggacttcatgcggttaagaagattgtctaccaaatatagaacagaaaagatatatcccacagccactggagaaaaagaagaaaatgttaaaaagaacagatacaaggacatactgccatttgatcacagccgagttaaattgacattaaagactccttcacaagattcagactatatcaatgcaaattttataaagggcgtctatgggccaaaagcatatgtagcaactcaaggacctttagcaaatacagtaatagatttttggaggatgatatgggagtataatgttgtgatcattgtaatggcctgccgagaatttgagatgggaaggaaaaaatgtgagcgctattggcctttgtatggagaagaccccataacgtttgcaccatttaaaatttcttgtgaggatgaacaagcaagaacagactacttcatcaggacactcttacttgaatttcaaaatgta

SEQ ID NO: 2095 - DNA, 859 bp, Artificial
  cDNA Sequence
gcgggaggatggagcaagtggagatcctgaggaaattcatccagagggtccaggccatgaagagtcctgaccacaatggggaggacaacttcgcccgggacttcatgcggttaagaagattgtctaccaaatatagaacagaaaagatatatcccacagccactggagaaaaagaagaaaatgttaaaaagaacagatacaaggacatactgccatttgatcacagccgagttaaattgacattaaagactccttcacaagattcagactatatcaatgcaaattttataaagggcgtctatgggccaaaagcatatgtagcaactcaaggacctttagcaaatacagtaatagatttttggaggatgatatgggagtataatgttgtgatcattgtaatggcctgccgagaatttgagatgggaaggaaaaaatgtgagcgctattggcctttgtatggagaagaccccataacgtttgcaccatttaaaatttcttgtgaggatgaacaagcaagaacagactacttcatcaggacactcttacttgaatttcaaaatgaatctcgtaggctgtatcagtttcattatgtgaactggccagaccatgatgttccttcatcatttgattctattctggacatgataagcttaatgaggaaatatcaagaacatgaagatgttcctatttgtattcattgcaggtacaaaagaatttcccaagtttataaatacattatttaagtttgatgttacacaaggttttatttctgcattaatatgttagtaatcttgaatttctcctagccttgatacaatgtttgggactagggccttgtaagttgatgtggtctcatttg

SEQ ID NO: 2096 - DNA, 907 bp, Artificial
  cDNA Sequence
ctaatttttgtattttttggtagagattgggtttcaccatgttggccaggctggtcttgagctcctgacctcaagtgatctgcccaccttggcctcctaaagtgctgggattacaggcacaagccaccgtgcccagcccatatacatatttttatcggttaagaagattgtctaccaaatatagaacagaaaagatatatcccacagccactggagaaaaagaagaaaatgttaaaaagaacagatacaaggacatactgccatttgatcacagccgagttaaattgacattaaagactccttcacaagattcagactatatcaatgcaaattttataaagggcgtctatgggccaaaagcatatgtagcaactcaaggacctttagcaaatacagtaatagatttttggaggatgatatgggagtataatgttgtgatcattgtaatggcctgccgagaatttgagatgggaaggaaaaaatgtgagcgctattggcctttgtatggagaagaccccataacgtttgcaccatttaaaatttcttgtgaggatgaacaagcaagaacagactacttcatcaggacactcttacttgaatttcaaaatgaatctcgtaggctgtatcagtttcattatgtgaactggccagaccatgatgttccttcatcatttgattctattctggacatgataagcttaatgaggaaatatcaagaacatgaagatgttcctatttgtattcattgcaggtacaaaagaatttcccaagtttataaatacattatttaagtttgatgttacacaaggttttatttctgcattaatatgttagtaatcttgaatttctcctagccttgatacaatgtttgggactagggccttgtaagttgatgtggtctcatttg

SEQ ID NO: 2097 - DNA, 1769 bp, Artificial
  cDNA Sequence
agtgcaggctgtggaagaacaggtgccatttgtgccatagattatacgtggaatttactaaaagctgggaaaataccagaggaatttaatgtatttaatttaatacaagaaatgagaacacaaaggcattctgcagtacaaacaaaggagcaatatgaacttgttcatagagctattgcccaactgtttgaaaaacagctacaactatatgaaattcatggagctcagaaaattgctgatggagtgaatgaaattaacactgaaaacatggtcagctccatagagcctgaaaaacaagattctcctcctccaaaaccaccaaggacccgcagttgccttgttgaaggggatgctaaagaagaaatactgcagccaccggaacctcatccagtgccacccatcttgacaccttctcccccttcagcttttccaacagtcactactgtgtggcaggacaatgatagataccatccaaagccagtgttgcatatggtttcatcagaacaacattcagcagacctcaacagaaactatagtaaatcaacagaacttccagggaaaaatgaatcaacaattgaacagatagataaaaaattggaacgaaatttaagttttgagattaagaaggtccctctccaagagggaccaaaaagttttgatgggaacacacttttgaataggggacatgcaattaaaattaaatctgcttcaccttgtatagctgataaaatctctaagccacaggaattaagttcagatctaaatgtcggtgatacttcccagaattcttgtgtggactgcagtgtaacacaatcaaacaaagtttcagttactccaccagaagaatcccagaattcagacacacctccaaggccagaccgcttgcctcttgatgagaaaggacatgtaacgtggtcatttcatggacctgaaaatgccatacccatacctgatttatctgaaggcaattcctcagatatcaactatcaaactaggaaaactgtgagtttaacaccaagtcctacaacacaagttgaaacacctgatcttgtggatcatgataacacttcaccactcttcagaacacccctcagttttactaatccacttcactctgatgactcagactcagatgaaagaaactctgatggtgctgtgacccagaataaaactaatatttcaacagcaagtgccacagtttctgctgccactagtactgaaagcatttctactaggaaagtattgccaatgtccattgctagacataatatagcaggaacaacacattcaggtgctgaaaaagatgttgatgttagtgaagattcacctcctcccctacctgaaagaactcctgaatcgtttgtgttagcaagtgaacataatacacctgtaagatcggaatggagtgaacttcaaagtcaggaacgatctgaacaaaaaaagtctgaaggcttgataacctctgaaaatgagaaatgtgatcatccagcgggaggtattcactatgaaatgtgcatagaatgtccacctactttcagtgacaagagagaacaaatatcagaaaatccaacagaagccacagatattggttttggtaatcgatgtggaaaacccaaaggaccaagagatccaccttcagaatggacatgattcagggagctagaagacactttaagttatactggaaaattcagatctgcaaatggaataaatgcaaatgggataaatgcaaaatggaataaatgtctggcagaagtcagaatctggaa

SEQ ID NO: 2098 - DNA, 2439 bp, Artificial
  cDNA Sequence
agtgcaggctgtggaagaacaggtgccatttgtgccatagattatacgtggaatttactaaaagctgggaaaataccagaggaatttaatgtatttaatttaatacaagaaatgagaacacaaaggcattctgcagtacaaacaaaggagcaatatgaacttgttcatagagctattgcccaactgtttgaaaaacagctacaactatatgaaattcatggagctcagaaaattgctgatggagtgaatgaaattaacactgaaaacatggtcagctccatagagcctgaaaaacaagattctcctcctccaaaaccaccaaggacccgcagttgccttgttgaaggggatgctaaagaagaaatactgcagccaccggaacctcatccagtgccacccatcttgacaccttctcccccttcagcttttccaacagtcactactgtgtggcaggacaatgatagataccatccaaagccagtgttgcatatggtttcatcagaacaacattcagcagacctcaacagaaactatagtaaatcaacagaacttccagggaaaaatgaatcaacaattgaacagatagataaaaaattggaacgaaatttaagttttgagattaagaaggtccctctccaagagggaccaaaaagttttgatgggaacacacttttgaataggggacatgcaattaaaattaaatctgcttcaccttgtatagctgataaaatctctaagccacaggaattaagttcagatctaaatgtcggtgatacttcccagaattcttgtgtggactgcagtgtaacacaatcaaacaaagtttcagttactccaccagaagaatcccagaattcagacacacctccaaggccagaccgcttgcctcttgatgagaaaggacatgtaacgtggtcatttcatggacctgaaaatgccatacccatacctgatttatctgaaggcaattcctcagatatcaactatcaaactaggaaaactgtgagtttaacaccaagtcctacaacacaagttgaaacacctgatcttgtggatcatgataacacttcaccactcttcagaacacccctcagttttactaatccacttcactctgatgactcagactcagatgaaagaaactctgatggtgctgtgacccagaataaaactaatatttcaacagcaagtgccacagtttctgctgccactagtactgaaagcatttctactaggaaagtattgccaatgtccattgctagacataatatagcaggaacaacacattcaggtgctgaaaaagatgttgatgttagtgaagattcacctcctcccctacctgaaagaactcctgaatcgtttgtgttagcaagtgaacataatacacctgtaagatcggaatggagtgaacttcaaagtcaggaacgatctgaacaaaaaaagtctgaaggcttgataacctctgaaaatgagaaatgtgatcatccagcgggaggtattcactatgaaatgtgcatagaatgtccacctactttcagtgacaagagagaacaaatatcagaaaatccaacagaagccacagatattggttttggtaatcgatgtggaaaacccaaaggaccaagagatccaccttcagaatggacatgattcagggagctagaagacactttaagttatactggaaaattcaggtgccactgaaagccagatttatagtattccatctttaatatgtgggactaacagcagtgtagattgttaccttaatattttttgctgggaccatctacctgccttatactacacttaggaaaaagtattacatatggtttattttgaaacttcaagtattattgccttaatgtctcttaaccctgttacacgctgcttgtagacatgttaatatagtaatacctttatgatatattgagtttaaggactactctttttctgttttatcatgtatgcattattttgtatatgtacagggcaagtaggtatataatttgataaagttgcaattgaaatattattaacagaagatgtaagaaatttctgcatggtctaaatctttgtgtactttatttgtaaattatttgccctggagttttagaaaatagtttctgaattttaaacttgctggattcatgcagccagctttgcaggttatcagagatcaaagattgtaataataattttgtaaattgtaagcaaaaagttatttttatattatatacagtctaattgttcatcctaattgttcctgttttcatctagtcagagattcagtaagtgccttggaacaatattgaattctcttagcttgtgtgtgtttctttaatatttgaactcaagtgggattagaagactatcaaaatacatgtatgtttcaggatatttgacctgtcattaaaaaaaacaaacagttttacagtg

SEQ ID NO: 2099 - DNA, 2439 bp, Artificial; identical to SEQ ID NO: 2098
  cDNA Sequence

SEQ ID NO: 2100 - DNA, 2439 bp, Artificial; identical to SEQ ID NO: 2098
  cDNA Sequence

SEQ ID NO: 2101 - DNA, 1220 bp, Artificial
  cDNA Sequence
ggaatttttagaatgtcaagaaagctctctgattttgtttagatgacatgttaatttgtctaaatttttatgtgtttaatttagatgttgatgttagtgaagattcacctcctcccctacctgaaagaactcctgaatcgtttgtgttagcaagtgaacataatacacctgtaagatcggaatggagtgaacttcaaagtcaggaacgatctgaacaaaaaaagtctgaaggcttgataacctctgaaaatgagaaatgtgatcatccagcgggaggtattcactatgaaatgtgcatagaatgtccacctactttcagtgacaagagagaacaaatatcagaaaatccaacagaagccacagatattggttttggtaatcgatgtggaaaacccaaaggaccaagagatccaccttcagaatggacatgattcagggagctagaagacactttaagttatactggaaaattcaggtgccactgaaagccagatttatagtattccatctttaatatgtgggactaacagcagtgtagattgttaccttaatattttttgctgggaccatctacctgccttatactacacttaggaaaaagtattacatatggtttattttgaaacttcaagtattattgccttaatgtctcttaaccctgttacacgctgcttgtagacatgttaatatagtaatacctttatgatatattgagtttaaggactactctttttctgttttatcatgtatgcattattttgtatatgtacagggcaagtaggtatataatttgataaagttgcaattgaaatattattaacagaagatgtaagaaatttctgcatggtctaaatctttgtgtactttatttgtaaattatttgccctggagttttagaaaatagtttctgaattttaaacttgctggattcatgcagccagctttgcaggttatcagagatcaaagattgtaataataattttgtaaattgtaagcaaaaagttatttttatattatatacagtctaattgttcatcctaattgttcctgttttcatctagtcagagattcagtaagtgccttggaacaatattgaattctcttagcttgtgtgtgtttctttaatatttgaactcaagtgggattagaagactatcaaaatacatgtatgtttcaggatatttgacctgtcattaaaaaaaacaaacagttttacagtg

SEQ ID NO: 2102 - DNA, 1243 bp, Artificial
  cDNA Sequence
aacacagctgtatgttccttcatgcagtagcccatgcttttcagtgctcatccagaaacatttactccaaggagaaatagcataacattttaaaattttaagcctaattaaaaaacaattgtttgcttttcctctgatgctgaaaatgataggccttgatttcttgggatatatacccataacagacccagctttctattatttgtatataaaatgaatgtattgtaataggtattaaatgtcttcctcgtagggcttgataacctctgaaaatgagaaatgtgatcatccagcgggaggtattcactatgaaatgtgcatagaatgtccacctactttcagtgacaagagagaacaaatatcagaaaatccaacagaagccacagatattggttttggtaatcgatgtggaaaacccaaaggaccaagagatccaccttcagaatggacatgattcagggagctagaagacactttaagttatactggaaaattcaggtgccactgaaagccagatttatagtattccatctttaatatgtgggactaacagcagtgtagattgttaccttaatattttttgctgggaccatctacctgccttatactacacttaggaaaaagtattacatatggtttattttgaaacttcaagtattattgccttaatgtctcttaaccctgttacacgctgcttgtagacatgttaatatagtaatacctttatgatatattgagtttaaggactactctttttctgttttatcatgtatgcattattttgtatatgtacagggcaagtaggtatataatttgataaagttgcaattgaaatattattaacagaagatgtaagaaatttctgcatggtctaaatctttgtgtactttatttgtaaattatttgccctggagttttagaaaatagtttctgaattttaaacttgctggattcatgcagccagctttgcaggttatcagagatcaaagattgtaataataattttgtaaattgtaagcaaaaagttatttttatattatatacagtctaattgttcatcctaattgttcctgttttcatctagtcagagattcagtaagtgccttggaacaatattgaattctcttagcttgtgtgtgtttctttaatatttgaactcaagtgggattagaagactatcaaaatacatgtatgtttcaggatatttgacctgtcattaaaaaaaacaaacagttttacagtg

SEQ ID NO: 2103 - DNA, 395 bp, Artificial
  cDNA Sequence
tataaaatgaatgtattgtaataggtattaaatgtcttcctcgtagggcttgataacctctgaaaatgagaaatgtgatcatccagcgggaggtattcactatgaaatgtgcatagaatgtccacctactttcagtgacaagagagaacaaatatcagaaaatccaacagaagccacagatattggtaatttgtttaataaataatttttagtaagtagttaacactggcaggaatgagaaaagctcatttgccattgtgaaatgacacttgccaagaataaaacatgattttccaaagttgcttggactagtcatgaaataaatgaaatacttaattctatttcacattgagattaaaaactaaaatagaaaactgcagtataaaaaatctttt

SEQ ID NO: 2104 - DNA, 1026 bp, Artificial
  cDNA Sequence
ttatttgaaaaggcataaaatttattgttaaaaacataaaattggtagattccctccatgttattgatataaggaatattttcactttcctttgagagttttcacttggctatcataactgttaggaccctactaacaatgttcagagactactgtttttgtgtactgtagatgttgatgcactcattcacaattttctcttctgtgggtatgggtgaagtttcctttatttattgatttttttagagatgggggtcttgctttgttgcccatgctggagtgcagtggcatgatcatacctcactgctgtcccgaactcctgggctcaagcaatcctcccgccccatgggtgaagttttaaaaagtgaatttgaaatacaaaagtaattcaaaatggccataaaagtaggctgtggtttatgtataactccctgcatggaactcctttctctctcaggaaattatattggaatgcatgtgagaaagtgatttctaaaatgcctcataatggtctgtgtgggtatacatacatatacacagataaataattcaaaactttggtaccttattgtagatgtttgttccttgaacatcttgcataccaagataaattattttggatcacctaatatcaaaaagtgacatacccaaaccaaaccaaaacaaaaaaacaaaatgtggataggcatggtagctgacgcctgtaatcccagcacttttggaggctgaggtgggagaactcaggagtttaagaccagcctgagcaacatagcaagacctcgtctctgctaaagaaaaaataaaatgggaggtggggtgccagccacagtggctgatgcctgtaattctggcactttgggaggccaaggcaggtggatcacttgaggtcaggagctcaagtgatcctcccgcttcagtctcccaaggtgctgggattacaggtgtgagcctgtgtgcctggccacattttacttttcttagagcatatttaacacttgggtttatatttcactatttgtgtatctt

SEQ ID NO: 2105 - DNA, 706 bp, Artificial
  cDNA Sequence
ggaagcgtccgaaaatgtatagcaaatctattcagaccatctgctcaggattgctaactgatgttgaagatcaagcagccaaaggcatcctaaatgataacataaaagattacgttgggaagaatttggataccaagaactatgattccaaaattccagagaacagtgagtttccatttgtctcattaaaggagccacgagttcagaataacctcaaaaggttggacactttggaatttaaacaactcattcatatagagcaccagcctaatggaggtgcatcggttatccatgcctacagtaacgaactctcccacctgtctcctatggagatggagaggtttgcagaagagtttgtgggtctagtgttcagtgaaaatgaaaactctgcagctttctacgtgatgggtattgttcatggggcagctacttatttacctgactttttagactatttttcatttaattttcccaattcaccagtgaaaatggagatattgggaaagaaagatatagagacaacgactatgtccaattttcatgctcaggtaaaaagaacgtattctcatggtacttacagagctggcccaatgagacaaataagcttggtgggagcagttgatgaagaagtaggagattatttccctgagttccttgacatgttggaagagtcaccatttttaaaatgtacactgccatgggggac

SEQ ID NO: 2106 - DNA, 443 bp, Artificial
  cDNA Sequence
ttccaaagtgtccaaccttttgaggttattctgaactcgtggctcctttaatgagacaaatggaaactcactgttctctggaattttggaatcatagttcttggtatccaaattcttcccaacgtaatcttttatgttatcatttaggatgcctttggctgcttgatcttcaacatcagttagcaatcctgagcagatggtctgaatagatttgctatacattttcggacgcttccgtttttcattctctttgtgtttctttttctttttcttctttacctttttaatttgtaagtcttctatatttgtttttggtttctccttcccacctcaaaatctttacttctccattctctttcttgatctcattcattactttatgtttctttttttctctttctttttctttgtctctctctttaattttgtctttgattttatct

SEQ ID NO: 2107 - DNA, 628 bp, Artificial
  cDNA Sequence
cttcggaggtcagagctcggcggggtgcggctagtggcggagcgcgctgcgaggggagggctttccactgtcgctggcgtgaactcgcgtgcccggtgggtatcagggaagaacccccgccccggacccccagatctgccatggccgaggtagcgatcgtctctgcggccacgaagactgttttaacttgtaccactttcccttccatttttcctggggtgcctctcaccctgcatctgcgcgttcagcaagctggatttcgggaatgctcagttcagaagagaaaaaattgccgggaatcaagtccttctttttgttagtcggtagtcgattgatgggaagtgttcaaaatcattcgatgtggtgacaaggcttcaccaggtactgccttctaacgagctggccatttccacatgtcagataggaccaacttgccttttaactacccgtgtgatacttaaacactgttgccggtatcacagcttttcttcaaaacaggtatcaccagtctgtgggtacaaaaggagagtaacatgaacgattcaaattccactggctcttgttcccatggattcacagaagttcagccccatttcaaaacttcacatttgcttctgggaagcccatt

SEQ ID NO: 2108 - DNA, 901 bp, Artificial
  cDNA Sequence
cttcggaggtcagagctcggcggggtgcggctagtggcggagcgcgctgcgaggggagggctttccactgtcgctggcgtgaactcgcgtgcccggtgggtatcagggaagaacccccgccccggacccccagatctgccatggccgaggtagcgatcgtctctgcggccacgaagactgttttaacttgtaccactttcccttccatttttcctggggtgcctctcaccctgcatctgcgcgttcagcaagctggatttcgggaatgctcagttcagaagagaaaaaattgccgggaatcaagtccttctttttgttagtcggtagtcgattgatgggaagtgttcaaaatcattcgatgtggtgacaaggcttcaccaggtactgccttctaacgagctggccatttccacatgtcagataggaccaacttgccttttaactacccgtgtgatacttaaacactgttgccggtatcacagcttttcttcaaaacaggaagcaacgagaatgagggcattccagtagcaggagacagcatgcatagagatgctgatgaagaaagagcctagcgcacgtgggaaactgcaaaagttcagactggttggaatgctggaaatgttgtgaatgacaggagatgaggctggcgagaaaacagaggtcagattgtggaaggctgtcaagccaaagactttgattttattcttgagattgatgagatgtgtgtaatccaggagtgtgcaaaacaatctgtaagggttcagaaaacatactgcttctatatatagttacctttgtcttaacttgaaaatttcaaattgtgtaggagttacaatgtgtgtaattgttattatagtactggatccaaataatttataaataaataaatatagacataata

SEQ ID NO: 2109 - DNA, 599 bp, Artificial
  cDNA Sequence
gctcggcggggtgcggctagtggcggagcgcgctgcgaggggagggctttccactgtcgctggcgtgaactcgcgtgcccggcttcaccaggtactgccttctaacgagctggccatttccacatgtcagataggaccaacttgccttttaactacccgtgtgatacttaaacactgttgccggtatcacagcttttcttcaaaacagggcagtcagtgaaggctccccaggggagatgacgtttgagccgagtttcagaagatgattggagtttaccacgtgttcacaggaagcaacgagaatgagggcattccagtagcaggagacagcatgcatagagatgctgatgaagaaagagcctagcgcacgtgggaaactgcaaaagttcagactggttggaatgctggaaatgttgtgaatgacaggagatgaggctggcgagaaaacagaggtcagattgtggaaggctgtcaagccaaagactttgattttattcttgagattgatgagatgtgtgtaatccaggagtgtgcaaaacaatctgtaagggttcagaaaacatactgcttctatatatagttacctttgtcttaacttg

SEQ ID NO: 2110 - DNA, 329 bp, Artificial
  cDNA Sequence
ccgcaagctctgcctcctgtgttcacgccattctcctgcctcagcctcctgacagctgggattacaggcgcccaccaccacaactggacagttattttatttttagaagagaggaggtatcactgtgttgcccaggctggtctcaaactcttaggctcaagcaatcctcgcgccttggactcccaaagtgctgcgattacaggtatgagccaatgtgctcagtctactccagtggtgttaaatgtctttcagttaacaccaatccagtgacgcccacccaacagaaatgtttactgacctaaatctaaggaaagcaattaatgttttca

SEQ ID NO: 2111 - DNA, 600 bp, Artificial
  cDNA Sequence
gcatcccacctcccggggggttcatcggcagcgcaggggctttgccaagacaggagtgctcctggaagcttcacgttttgagaaagaatccgtgaccaccaagcaaaccaccctatacctaacggtggaacagtttgtccccacatttgcgagacgtgtttatgtgtctgttgaaccgtgtccgtggctcaggggacatgggcctcggcggtgaggcgcaagagggcaggggccgcctccaggctgcgcgcggcggggcgagagcccccagccgcccccgagctccgcacctgtgcaggctggggctgcgcgcgagatgctcggctcccggccctgccactccgggctttttgatgatttgatgttttagaaaacgattatgagagcttacatgtattaaatgttgaaagaaatggaaatattatttatacctataaggatgataagggaaatgtcgtctttggattatatgattgtcaaaccagacaaaatgagcttctatatacctttgagaaagacttgcaagttttcagttgctctgtcaacagtgaaaggactttgcttgctgcaagtttagttcagtctactaaagaaggaaaa

SEQ ID NO: 2112 - DNA, 476 bp, Artificial
  cDNA Sequence
agtcattgtcagggtccctggtattggattgttgttctggaaagctctatagagcactgctcagccagtcgtctttattacagcttctgcagaacacttgcttagactgtgagaagatggctgcgttgcactgcgcgctctactgcggtcaaggtgcgcagttcctggaagcccagattattcagtggatttctgagaatgtctctgcctgccattcatttgacctcattcaggaatttataattgcttcttcatactggagtgtatattcagagacaagtaacatggacaaactattgccacattcctcagtgctcacttggaatacagaaattcctggaataactcttgtgacagaagacattgcattgcctcttatgaaggtgctcagctttaagggctactgggaaaaactgaactccaacctagaatatgttaagtacgccaagccacacttccactataacaacagtgtg

SEQ ID NO: 2113 - DNA, 1541 bp, Artificial
  cDNA Sequence
tctcctacaggtgctcagctttaagggctactgggaaaaactgaactccaacctagaatatgttaagtacgccaagccacacttccactataacaacagtgtggtcaggagagagtggcacaacctgatctctgaagagaaaacaggaaaaagaaggtctgcggcatacgtgaggaatattcttgataatgcagtaaaggtgatttctaacctagaagcaagaaatttggggccaagattaacacccctcctgcaggaggaagacagccaccagcggctgctcatggggctgctggatctcatttgccacatcgtagaaaccaattggaggaaacataatcttcattcctgggttctccacttcaatagtcgtggcagtgctgctgaatttgcagtttttcacatcatgaccaggattctggaagctacaaacagtttgtttttacctctgcctcctggttttcatactctgcacaccatcctcggggtccagtgtctccctttgcataacctgctgcattgcattgacagtggagtgttgcttctcactgaaacagctgtcataaggctcatgaaagatctggataatacagagaaaaatgaaaaactgaaattcagtatcattgtgcggcttcctccgcttattgggcagaagatttgtagactttgggatcatcctatgagttctaacatcatttcgcggaaccacgtgacgcgactgcttcagaactataagaaacagcctcggaattctatgattaacaagtcatcgttcagtgtagaatttctgcctctgaactacttcattgaaattctgacagatatagagtcctccaatcaagccctgtatccttttgaaggacatgacaatgtggatgcagaatttgtagaggaagcagctctgaaacacaccgcgatgcttttaggcttatgaaaaagaaaacgcaattggatctgctgctgccattttaatcttgctcattaaccttactcctttgagaattctttaacaatatttaaaattggtaacaaaaatagtttagccataattgtttagccatgtgagtttcaggttggtacacgttcagacagaactgctgtatcacattccaattttgaatagccagtgagcaatcaagtgtagagaaatgataaatggcctaagaaggcatacagtggcataaacgatgctcttcctagtagcttaataggccacaagctagtttctgttgcactctgaaataaaatatgctttaaaaatgtagggaacagtgcttagaaaagcaaaaactaggtgtgtcattgaaataataggcataaaaattaaatgttacataagaacactatttggaaagagggtccttttaaaaactgaatttgtactaaatcagatttgccatgtccagtacagaataatttgtacttagtatttgcagcagggtttgtctttgtgaattcagatgaaacatatttatttttttttatttataaaaggttgatttaggaatattttgtcagtcattaaaaaacctgaaaacata

SEQ ID NO: 2114 - DNA, 1218 bp, Artificial
  cDNA Sequence
tctcctacaggtgctcagctttaagggctactgggaaaaactgaactccaacctagaatatgttaagtacgccaagccacacttccactataacaacagtgtggtcaggagagagtggcacaacctgatctctgaagagaaaacaggaaaaagaaggtctgcggcatacgtgaggaatattcttgataatgcagtaaaggtgatttctaacctagaagcaagaaatttggggccaagattaacacccctcctgcaggaggaagacagccaccagcggctgctcatggggctgctggatctcatttgccacatcgtagaaaccaattggaggaaacataatcttcattcctgggttctccacttcaatagtcgtggcagtgctgctgaatttgcagtttttcacatcatgaccaggattctggaagctacaaacagtttgtttttacctctgcctcctggttttcatactctgcacaccatcctcggggtccagtgtctccctttgcataacctgctgcattgcattgacagtggagtgttgcttctcactgaaacagctgtcataaggctcatgaaagatctggataatacagagaaaaatgaaaaactgaaattcagtatcattgtgcggcttcctccgcttattgggcagaagatttgtagactttgggatcatcctatgagttctaacatcatttcgcggaaccacgtgacgcgactgcttcagaactataagaaacaggtgagtttctctgaaagcacagccaactaaatgtttttaggatcctgtttgcccgtgacaacatatctgtatggacagcaattacagttcttatcactttattttaaaattgtgcttattgtggagaatcagcttacaccagaagtggtttcccttttagcctcggaattctatgattaacaagtcatcgttcagtgtagaatttctgcctctgaactacttcattgaaattctgacagatatagagtcctccaatcaaggtaatttactcccctgttctcagggtcttaccacttttcccttgacacatcagtccttccctattcacttctttgtcttctttccaaaatccttttaacatacaagtagacccttatagcaattggtttacattagcagtaccaaatttactacctagagtaaattaccaaataatcacctctgaagttttaaaagagtcaagaggtttaaagccc

SEQ ID NO: 2115 - DNA, 630 bp, Artificial
  cDNA Sequence
cctctgtttccagtggagcagaggttcttagcagtgagttttagtgttgaacaaaaatcaaagctagagcctactggggttgaggaatgtgttggtttctttctttctcggtcattccctgtttcacacagctctgataagttcaccttgtaggactaggtcacacttaggtgatgaaaaattttcatcctgtgttatgttttctcaatgactcagagaagggaaacccaggctgattcttcttccttctaacccatctcctgaaaactgctcagagcctaactattgctctgtttcatttcagggccaagattaacacccctcctgcaggaggaagacagccaccagcggctgctcatggggctgatggtgtctgagctaaaagaccattttttgagacacctacagggtgtagaaaagaagaaaattgaacagatggttctggactacatttcaaaactgctggatctcatttgccacatcgtagaaaccaattggaggaaacataatcttcattcctgggttctccacttcaatagtcgtggcagtgctgctgaatttgcagtttttcacatcatgaccaggattctggaagctacaaacagtttgtttttacctctgcctcctggt

SEQ ID NO: 2116 - DNA, 1385 bp, Artificial
  cDNA Sequence
gccctgcgcactccctgctggggtgagcagcactgtaaagatgaagctggctaactggtactggctgagctcagctgttcttgccacttacggttttttggttgtggcaaacaatgaaacagaggaaattaaagatgaaagagcaaaggatgtctgcccagtgagactagaaagcagagggaaatgcgaagaggcaggggagtgcccctaccaggtaagcctgccccccttgactattcagctcccgaagcaattcagcaggatcgaggaggtgttcaaagaagtccaaaacctcaaggaaatcgtaaatagtctaaagaaatcttgccaagactgcaagctgcaggctgatgacaacggagacccaggcagaaacggactgttgttacccagtacaggagccccgggagaggttggtgataacagagttagagaattagagagtgaggttaacaagctgtcctctgagctaaagaatgccaaagaggagatcaatgtacttcatggtcgcctggagaagctgaatcttgtaaatatgaacaacatagaaaattatgttgacagcaaagtggcaaatctaacatttgttgtcaatagtttggatggcaaatgttcaaagtgtcccagccaagaacaaatacagtcacgtccagttcaacatctaatatataaagattgctctgactactacgcaataggcaaaagaagcagtgagacctacagagttacacctgatcccaaaaatagtagctttgaagtttactgtgacatggagaccatggggggaggctggacagtgctgcaggcacgtctcgatgggagcaccaacttcaccagaacatggcaagactacaaagcaggctttggaaacctcagaagggaattttggctggggaacgataaaattcatcttctgaccaagagtaaggaaatgattctgagaatagatcttgaagactttaatggtgtcgaactatatgccttgtatgatcagttttatgtggctaatgagtttctcaaatatcgtttacacgttggtaactataatggcacagctggagatgcattacgtttcaacaaacattacaaccacgatctgaagtttttcaccactccagataaagacaatgatcgatatccttctgggaactgtgggctgtactacagttcaggctggtggtttgatgcatgtctttctgcaaacttaaatggcaaatattatcaccaaaaatacagaggtgtccgtaatgggattttctggggtacctggcctggtgtaagtgaggcacaccctggtggctacaagtcctccttcaaagaggctaagatgatgatcagacccaagcactttaagccataaatcactctgttcattcctccaggta

SEQ ID NO: 2117 - DNA, 788 bp, Artificial
  cDNA Sequence
gggtggacttaggcaaggggtccaggtcagagttcagagctttcaaatcccaacttgcccctggggattacgcagctgatgtttacatcgcctagtcaagccaaccggctcgctcttgtttcagcaaaccctgacttacgtctcctatttgacttgaggcggcacagtggccaagtcgattggccgtggcaagtgaccctccctgtggctgaagtgttctgaggactggcgagagaggcgcgccatgcttgccccctgttcaggttgggagcttggctgcttccgtctctgtctccgtcaggtccgactgtgggctggcgttgggcgctggtcttgctgggcttgccaagccaggccgtacagctcaggtagaggcgagcgctggcccggatcggagactgaggtccctccgcctggcccggcgcgccgaactctgaaggagtggacactgcaggtttagatatcaagtcatcagggtctggctgtgtagaagttcaaagtattgagggtgataattgcaaaattgaaacagagcatgggactagcatcttgcagtctgttaagggtcaaaaattgcatgttcaaacaaaaggaggcaaagtgatctgtctgggaacagtttatggaaatatagatattcatgcatcagataaaagctgtgaccatagataaactgcagggaagttctgttactgtatctaccgaagatgggttgctgaaagccaagtatctttatacagaatcatcatttctgtcttctgctgctggggatattacattaggaagtg

SEQ ID NO: 2118 - DNA, 935 bp, Artificial
  cDNA Sequence
cttaggcaaggggtccaggtcagagttcagagctttcaaatcccaacttgcccctggggattacgcagctgatgtttacatcgcctagtcaagccaaccggctcgctcttgtttcagcaaaccctgacttacgtctcctatttgacttgaggcggcacagtggccaagtcgattggccgtggcaagtgaccctccctgtggctgaagtgttctgaggactggcgagagaggcgcgccatgcttgccccctgttcaggttgggagcttggctgcttccgtctctgtctccgtcaggtccgactgtgggctggcgttgggcgctggtcttgctgggcttgccaagccaggccgtacagctcaggtagaggcgagcgctggcccggatcggagactgaggtccctccgcctggcccggcgcgccgaactctgaaggagtggacactgcaggtgagcccgttcggtcggctgcgggcgcggctcccgtgccacctggccgtgaggcccctggaccccctcacctacccggatggcgaccgcgtgctggtcgcggtgtgcggcgtggagggcggcgtgcggggcctggacggcctgcaggtgaagtacgacgaggatctggaggagatggccattgtgtctgatactatccacccccaggcgtccgtggaggtttagatatcaagtcatcagggtctggctgtgtagaagttcaaagtattgagggtgataattgcaaaattgaaacagagcatgggactagcatcttgcagtctgttaaggtaatataacattacaaagcgagatgggtaacatcacagtagattcgtcttctggatgtctaaaagcctcaactaatcagggtgccatagatgtttatgtcagccaactggggaaagtggaattgaaatcccataaaggttctattattgtcaaggtcc

SEQ ID NO: 2119 - DNA, 510 bp, Artificial
  cDNA Sequence
ccctggggtagatcccagccccccatgtaggtcccttggctggaaaaggaagaaggagtggtcagatgaatctgaggaggagccggagaaggagctcgcccctgagcctgaggagacctgggtagtggagatgctgtgtgggctcaagatgaagctgaagcaacagcgagtgtcacccatcctccctgagcaccacaaggacttcaacagtcagcttgaggatcctgtcattaaaagattcctggcctgggacaaagatctgagggtgtcggacaagtatctcctggctatggtcatagcgtatttcagccgggccggcctcccctcctggcaataccaacgcattcatttcttcctggctctctacctggccaatgacatggaggaggacgacgaggaccccaaacaaaacatcttctacttcctgtatgggaagacccgctctcgcatacccttggtccgtaaccgtcggttccagttatgccgttgcttgaacccgagggccaggaa

SEQ ID NO: 2120 - DNA, 228 bp, Artificial
  cDNA Sequence
ccgaggaacccaattgcttgatccggcttcaagcctgggcaacgtggcgagatcccctctccacaaaaatacaaaaattagccaggcgatgtgggacgcatctctactcccaactactcaggaggctgaggcgggaggatcgctggagcctggaaggctggacgaggggagagaggggtatcctggggagtccccgtcttctcaaagcgcgtttgtttttccagatcc

SEQ ID NO: 2121 - DNA, 434 bp, Artificial
  cDNA Sequence
acccgagggccaggaagaactgctctcagatagccttgttccggaagtatcggttccacttcttttgttccatgcgctgcagggcttgggtttccctggaggagttggaagagatccaggcttatgacccagagcactgggtgtgggcgcgagatcgcgcccacctttcctagagctccagggaccgtggaggcctgaggtcatcggcctgagagaagaacaccggacccaggggagatgtggattttcagcaggaactttattccaatgctaatggcagacatcaggaaggaggagaggaaccatttgtgcagatcatctagaagaacctggaccattcttgatggagctgaatacagtgatcacgttgtcctccaaggagcaggggtggggtggggtacttctaggagtccttggagaaaagtaagaaacca

SEQ ID NO: 2122 - DNA, 591 bp, Artificial
  cDNA Sequence
tttatgggtctaatctattcatttattatattaacaaatacatttattatatccagaaatggaaacattgttttacaatccttaaacaagtacccaaaatacttctggatagacacttcaaattcaacacatccttactatctagtatccacatggagaaaacatacattgtatctctcaaattaccaaaatctttggcaataatggtgtcttctttcttgaaaactgaaagcatggccggtgcggtggctcatgcctgtaatcccagcaatttgggacacagaggcaggcggatcacttgagatcaggagtttgagaccagcctggccaacgtccactaggattacaggtgtgagccaccgcaactggccgtcccctatattgcagcacagtgaacaactgtttcctgaacatcacaagctcttttagacactacagtgtataagcaggtctctgtctaaactgctctcctcttgcccctctgcccaaccaatgtctgctcatccaaagaatgtatcccgtgtgttcattaacttagcaagttcccagtaaacagtttaattgatcactcgttaagagaaggcgggaaac

SEQ ID NO: 2123 - DNA, 625 bp, Artificial
  cDNA Sequence
aacaatgggacttccatagcaatgggatttccttccgcattcagtttgtgcctttcccatgagcgagagactcctaggagagccgcagcccgttaggaagccatgtgggaactcatccacagactggactctgaaacgggcatgtacagagaagaggagaccccaacacgcttcaagctttgagtggagaggacacagcctctgctgggacagggaacagagggatgcggagaccctgaagatgcttttggacagtggtctgaggttgggacagtggcaggagataccattcacccaggatctccaggacaagagatcagcctggcagttacatgtgttttttttcaaactggttgccaggttggcatgagcgatgacatcagagattccgaccttcctgattggagggaccggactctgtcggcacctgggagttcagttggacaacagtaacttctcagagctgttctccactcctgacttctcccagcctcgagaattgataacacactcttctggatcccagcagtgtccagaagaagaccaaggacagaacagagactaggtttggtgagatgggacagattttgggaaagatcatgatgagccatcaaccgcagcccca

SEQ ID NO: 2124 - DNA, 154 bp, Artificial
  cDNA Sequence
gagacctgggtggcggagacgctgtgtggcctcaagatgaaggcgaagcgacggcgagtgtcgctcgtgctccctgagtactacgaggccttcaacaggctgcttgaggatcctgtcattaaaagactcctggcctgggacaaagatctgaggg

SEQ ID NO: 2125 - DNA, 453 bp, Artificial
  cDNA Sequence
gcaccggctgttggagtgccggtccagggtccaacatttagtaaccaacatcaaatgtacttgtctctcctaagctgcacagactgccaagtctctcgtcaggtcttcgccgcaaatctctctccagaggatcgtggctgaggcaccatggaatgctgctgttctactggagatgaaatttcatccaaaagaaaaagggaaaagtatccaaaagtctttctagtctccaggcatttagaaaagctttagaacaagatctgcactggcacaagaatttgagtggaaatcaccctgcccagctgtgagccccggggcgggtgagccacacacttggatctcactgcagttgtggcctctgggaagaaggctttgaatgcagattttaaacaggtactcaactcatactgagccacggctactttcaacttaacaatatgtgagaaacccatctga

SEQ ID NO: 2126 - DNA, 813 bp, Artificial
  cDNA Sequence
agttggaacctattatgcaggttctttaggtccaggctaaggagtctgaactttgtgcttcagacatcgatgaaccaacaaagattttatagcagttttgttggaggaggtttcatgcttgaggaaaaccttgatatacagaactggaaaatggaatgccagaggacttggatctgagctaaaggacagtattccagttactgaactttcagcaagtggaccttttgaaagtcatgatcttcttcggaaaggtttttcttgtgtgaaaaatgaacttttgcctagtcatccccttgaattatcagaaaaaaatttccagctcaaccaagataaaatgaatttttccacactgagaaacattcagggtctatttgctccgctaaaattacagatggaattcaaggcagtgcagcaggttcagcgtcttccatttctttcaagctcaaatctttcactggatgttttgaggggtaatgatgagactattggatttgaggatattcttaatgatccatcacaaagcgaagtcatgggagagccacacttgatggtggaatataaacttggtttactgtaatagtgtgctgttcatggaaaccgagggctgcatcttgtttatagtcatctttgtactgtaatttgatgtacacaacattaaaagtactgacacctgagaatttctgctcaagtagtatcagtgatcatttaaaatttggaggggtctttggtttacagccatgtgacaattaaaagcactaaagggagatcatgttaaagctcttaatttatattaaaacagtagcctttgtcttt

SEQ ID NO: 2127 - DNA, 1305 bp, Artificial
  cDNA Sequence
ggaaacggaagtgagcggcggggtcgactgacggtaacggggcagagaggctgttcgcagagctgcggaagatgaatgccagaggacttggatctgagctaaaggacagtattccagttactgaactttcagcaagtggaccttttgaaagtcatgatcttcttcggaaaggtttttcttgtgtgaaaaatgaacttttgcctagtcatccccttgaattatcagaaaaaaatttccagctcaaccaagataaaatgaatttttccacactgagaaacattcagggtctatttgctccgctaaaattacagatggaattcaaggcagtgcagcaggttcagcgtcttccatttctttcaagctcaaatctttcactggatgttttgaggggtaatgatgagactattggatttgaggatattcttaatgatccatcacaaagcgaagtcatgggagagccacacttgatggtggaatataaacttggtttactgtaatagtgtgctgttcatggaaaccgagggctgcatcttgtttatagtcatctttgtactgtaatttgatgtacacaacattaaaagtactgacacctgagaatttctgctcaagtagtatcagtgatcatttaaaatttggaggggtctttggtttacagccatgtgacaattaaaagcactaaagggagatcatgttaaagctcttaatttatattaaaacagtagcctttgtctttaaaaaagttgttgctcatgaatattataaaatgatctacaggtttcaattcaacctgtttctaggtttttttgtaaatttagttttgattaagcattataagcatttgagtctataaactttatagtagcatctttcagaataaacatttttaattgatttcagtggcaactctcaaattgattacaatatgagatatatcagtgtcgtccattaacactcataagaataatatttactgtgtcagtgctattttaggattatagttattgtttgattatttcaggttgaaaagtagaagttccaaggttttgattttggtctggtctttaagtgaaaaattaaagcaaccagtagatgtaggttaaacttttacttcatagacttaatatgtaattaatatattgccaagcaacactgttaaagaaaagtaaaactcattttttcttgttcttaatttatatattacaagatactgtaaggtattctttatgaagttgatatataaaaatttacatttttagaacattagtgaatggatcatcttttacaattaaaagtatattttgatta

SEQ ID NO: 2128 - DNA, 502 bp, Artificial
  cDNA Sequence
ggggtcgactgacggtaacggggcagagaggctgttcgcagagctgcggaagatgaatgccagaggacttggatctgagctaaaggacagtattccagttactgaactttcagcaagtggaccttttgaaagtcatgatcttcttcggaaagggtatatgggggagttatgactttgattttgttatgtttctgtgaattttcacaatattctttaagtattttgataggctatacatgtgtatttagttggcagatggcaagtaatataccttacatggggtgcagaggggaagaggcttagatattttctgtagtggaagaggtgtctcatcaaagtagtaggttcccaattagagcatcctcctaggcagtggtgcccattagcatgatttggtaggattctttttatttatttttttgctactgataacttagccatttgccttcttgtcttaactattagggtaattcacttttctttgggaggcactagaacatag

SEQ ID NO: 2129 - DNA, 338 bp, Artificial
  cDNA Sequence
tttgggaatgaagaacagccagttctgaaggcatctctgccttctaaggacacacccaagggggccggccgggtggcccctccagcatcctccagtgtgacagcaccccgcaggagtttacttccagcgccaaaatccacttccacacccgctgttctggaggctggaacatccaagatcaagacactggaagaaggaaacaaatgccagtcatcaattctgtaagataactggagaagagtgacatatttatttggcattgcagagccttcacatctttcatctttaacccaccagtcagcaaatttctgttgagaaccactttgggcccacacttt

SEQ ID NO: 2130 - DNA, 645 bp, Artificial
  cDNA Sequence
ggagttgcccgctgacaccttgaatgaaggaggtccccttgccagccagcctgccgggatgggccattgctgctgcaagccttataactgccttcagtgcctggacaagacgaatgaaagtgcccttgtgaaagaaaaagagctgtcaatcgaacttgcaaacatcagggatgaagttgccttccatacagcaaagtgcgagaaactacaaaaggagaaggaggagctggagaggcggttcgaggacgaggtgaagaggctgggctggcagcagcaggccgagctccaggagctggaggagcggctgcagctgcaattcgaggcggaaatggcgcgcctgcaggaggagcacggtgaccagctgctgagcatccggtgtcaacaccaggagcaggtggaagatctcaccgccagccatgatgctgctctcctagagatggaaaataaccacacagttgccatcacaatcctgcaggatgaccacgaccacaaagtccaagaattgatgtccactcatgagcttgaaaagaaagaattggaagaaaattttgaaaaactgcggctgtcattgcaggaccaggtggacacgctgaccttccagagccagtctctgcgggacagagcccgccgcttcgaagaggcctt

SEQ ID NO: 2131 - DNA, 656 bp, Artificial
  cDNA Sequence
gcggccgcgggctcccgctaaccgcagcctccactcctctccccgcgcgccgcgcccccgccccgccccgccccgcccggtctcgccggccgagcgtccgttggtccttgagcgcgtccgacagtctgtctgttcgcgatcctgccggagccccgccgccgccggcttggattctgaaaccttccttgtatccctcctgagacatctttgctgcaagatcgaggctgtcctctggtgagaaggtggtgaggcttcccgtcatattccagctctgaacagcaacatggggtgcaaagtcctgctcaacattgggcagcagatgctgcggcggaaggtggtggactgtagccgggaggagacgcggctgtctcgctgcctgaacacttttgatctggtggccctcggggtgggcagcacactgggtgctggtgtctacgtcctggctggagctgtggcccgtgagaatgcaggccctgccattgtcatctccttcctgatcgctgcgctggcctcagtgctggctggcctgtgctatggcgagtttggtgctcgggtccccaagacgggctcagcttacctctacagctatgtcaccgttggagagctctgggccttcatcaccggctggaacttaatcctctcctacatcatcggta

SEQ ID NO: 2132 - DNA, 553 bp, Artificial
  cDNA Sequence
gatgtggccagtggtgtggatgtgaatattcatccctgtggaggaaaatagtggggtctctgagatttgattctgaaaccttccttgtatccctcctgagacatctttgctgcaagatcgaggctgtcctctggtgagaaggtggtgaggcttcccgtcatattccagctctgaacagcaacatggggtgcaaagtcctgctcaacattgggcagcagatgctgcggcggaaggtggtggactgtagccgggaggagacgcggctgtctcgctgcctgaacacttttgatctggtggccctcggggtgggcagcacactgggtgctggtgtctacgtcctggctggagctgtggcccgtgagaatgcaggccctgccattgtcatctccttcctgatcgctgcgctggcctcagtgctggctggcctgtgctatggcgagtttggtgctcgggtccccaagacgggctcagcttacctctacagctatgtcaccgttggagagctctgggccttcatcaccggctggaacttaatcctctcctacatcatcgg

SEQ ID NO: 2133 - DNA, 571 bp, Artificial
  cDNA Sequence
cactttttcaggacttttaactcttggtgtgaaagagtcggccatggtcaacaaaatattcacttgtattaacgtcctggtcctgggcttcataatggtgtcaggatttgtgaaaggatcggttaaaaactggcagctcacggaggaggattttgggaacacatcaggccgtctctgtttgaacaatgacacaaaagaagggaagcccggtgttggtggattcatgcccttcgggttctctggtgtcctgtcgggggcagcgacttgcttctatgccttcgtgggctttgactgcatcgccaccacaggtgaagaggtgaagaacccacagaaggccatccccgtggggatcgtggcgtccctcttgatctgcttcatcgcctactttggggtgtcggctgccctcacgctcatgatgccctacttctgcctggacaataacagccccctgcccgacgcctttaagcacgtgggctgggaaggtgccaagtacgcagtggccgtgggctccctctgcgctctttccgccagtcttctaggttccatgtttcccatgcctcgggttatctat

SEQ ID NO: 2134 - DNA, 851 bp, Artificial
  cDNA Sequence
aggatggactgctatttaaattcttagccaacgtcaatgataggaccaaaacaccaataatcgccacattagcctcgggtgccgttgctgctgtgatggccttcctctttgacctgaaggacttggtggacctcatgtccattggcactctcctggcttactcgttggtggctgcctgtgtgttggtcttacggtaccagccagagcagcctaacctggtataccagatggccagtacttccgacgagttagatccagcagaccaaaatgaattggcaagcaccaatgattcccagctgggctttttaccagaggcagagatgttctctttgaaaaccatactctcacccaaaaacatggagccttccaaaatctctgggctaattgtgaacatttcaaccagcctcatagctgttctcatcatcaccttctgcattgtgaccgtgcttggaagggaggctctcaccaaaggggcgctgtgggcagtctttctgctcgcagggtctgccctcctctgtgccgtggtcacgggcgtcatctggaggcagcccgagagcaagaccaagctctcatttaaggtgagcagctcggcctagggaaggaaccctggtacacagaccctggccctcctgatgcctggccagccctgcgtgggctcagccgggcctgggtgctcccgaggaaggtttttgctagccagcttcaggtaagatggggcaggggtcctgaaggcacagagaggaccagaccctggaaggaggcagcagcccttctcccctggacgtttccctgagtagtcaagggcaggctgacaccttcctgcatgacacaggccaagagagacctcgcca

SEQ ID NO: 2135 - DNA, 733 bp, Artificial; identical to SEQ ID NO: 942
  cDNA Sequence

SEQ ID NO: 2136 - DNA, 373 bp, Artificial
  cDNA Sequence
acagagctcattgggaaatcaaggatattttctataaggcaatccagaaacgcagacagtctcaagaaaaaattgatgacattctccaaactttactagatgctacatacaaggatgggcgtcctttgactgatgatgaagtagcagggatgcttattggattactcttggcagggcagcattcatcctcaactactagtgcttggatggacttctttttggccagagacaaaacacttcaagaaaaatgttatttagaacagaaaacagtctgtggagagaatctgcctcctttaacttatgaccaactcaaggatctaaatttacttgatcgctaactcctcagactgtggtagggtataccattcctcca

SEQ ID NO: 2137 - DNA, 906 bp, Artificial
  cDNA Sequence
cggcggacagcgatgctcagctggctgcggccgagtcatcgcctagcgctggcagggccgctgaccgaccgacggaggcgccgattggccgattgtccactgcgcagaaggagcagctgctccgcgccccgccgcgccgcgctgaggccgaggtccgcagggccgcggggaagccgagggctgccggagaaccctgcaggtgtcactcgggacgcggaagtgcgcttgccgaggtttgctttacaatacgcttgagactccccgacaagcgtaatttggtcgagttcgacgggaaagtactctccccaccccagcgccggccgcgtagtccgaggttactgtccccggcgcgtcctctgttgccccagtccagaggctgcccttgaacccgggcgcgcacgagcgcagggcatccgaggcgacagcccctggcacggcccgacctgtacccagcctggcaggaagactgtaatcgtgggaatacagctacctacccaggcaatatgaagattttatttgtagaacctgccattttccttagtgcatttgctatgactttgaccggtccactgacaacgcaatatgtttatcggagaatatgggaagaaactggcaactacactttttcatctgatagcaatatttctgagtgtgaaaaaaacaaaagcagcccaatttttgcattccaggaggaagttcagaaaaaagtgtcacgttttaatctgcagatggacataagtggattaattcctggtctagtgtctacattcatacttttgtctattagtgatcactacggacgaaaattccctatgattttgtcttccgttggtgctcttgcaaccagcgtttggctctgtttgctttgctattttgcctttccattccagcttttgattgcatcta

SEQ ID NO: 2138 - DNA, 1013 bp, Artificial
  cDNA Sequence
ctaattattgctgtgtctcttgctgttaatttgatctatattttattttttctcggagatccagtgaaagagtgttcatctcagaatgttactatgtcatgtagtgaaggcttcaaaaacctattttaccgaacttacatgctttttaagaatgcttctggtaagagacgatttttgctctgtttgttactttttacagtaatcacttatttttttgtggtaattggcattgccccaatttttatcctttatgaattggattcaccactctgctggaatgaagtttttataggttatggatcagctttgggtagtgcctcttttttgactagtttcctaggaatatggcttttttcttattgtatggaagatattcatatggccttcattgggatttttaccacgatgacaggaatggctatgaccgcgtttgccagtacaacactgatgatgtttttagccagggtgccgttccttttcactattgtgccattctctgttctacggtccatgttgtcaaaagtggttcgttcgactgaacaaggtaccctgtttgcttgtattgctttcttagaaacacttggaggagtcactgcagtttctacttttaatggaatttactcagccactgttgcttggtaccctggcttcactttcctgctgtctgctggtctgttactacttccagccatcagtctatgtgttgtcaagtgtaccagctggaatgagggaagctatgaacttcttatacaagaagaatccagtgaagatgcttcagacaggtgactgtgatttaaacaaacaaaaaaaatctatgaatgcacatatcatataccatgacttctgaagactataaatgaattccacaatcagtgcttcactgagaaccaattttacctatcttttcttctaaactgaacagtcagagagacagctcctggctttagcttcttgtggtaccacgcactttgagcactttgtgcgtatcatgcaatatacttgcaatacacaga

SEQ ID NO: 2139 - DNA, 577 bp, Artificial
  cDNA Sequence
agccagggtgccgttccttttcactattgtgccattctctgttctacggtccatgttgtcaaaagtggttcgttcgactgaacaaggtaccctgtttgcttgtattgctttcttagaaacacttggaggagtcactgcagtttctacttttaatggaatttactcagccactgttgcttggtaccctggcttcactttcctgctgtctgctggtctgttactacttccagccatcagtctatgtgttgtcaagtgtaccagctggaatgagggaagctatgaacttcttatacaagaagaatccagtgaagatgcttcagacaggtgactgtgatttaaacaaacaaaaaaaatctatgaatgcacatatcatataccatgacttctgaagactataaatgaattccacaatcagtgcttcactgagaaccaattttacctatcttttcttctaaactgaacagtcagagagacagctcctggctttagcttcttgtggtaccacgcactttgagcactttgtgcgtatcatgcaatatacttgcaatacacagaacaaatttcaaatacgcctcac

SEQ ID NO: 2140 - DNA, 233 bp, Artificial
  cDNA Sequence
ctcaggtgtcagtacttttaatgttgtgtacatcaaattacagtacaaagatgactataaacaagatgcagccctcggtttccatgaacagcacactattacagtaaaccaagtttatattccaccatcaagtgtggctctcccatgacttcgctttaatatcctcaaatccaatagtctcatcattacccctcaaaacatccagtgaaagatttgagcttgaaagaaatgga

SEQ ID NO: 2141 - DNA, 782 bp, Artificial
  cDNA Sequence
aaagcagttagaagtacttgttagtccaacatgctcctgcaagcaggctgaaggttgtgtgcgtgaaataactaagaagttgggcaaccccaaacagcctacaaatcctttcctggaaatgatcaagtttctcttggagaggatagcacctgtgcacatagataccgaatctatcagtgctcttattaaacaagtgaacaaatcaatagatggaacagcagatgatgaagatgagggtgttccaactgatcaagccatcagagcaggtcttgaactgcttaaggtactctcatttacacatcccatctcatttcattctgctgaaacatttgaatcattactggcttgtctgaaaatggatgatgaaaaagtagcagaagctgcactacaaattttcaaaaacacaggaagcaaaattgaagaggattttccacacatcagatcagccttgcttcctgttttacatcacaaatctaaaaaaggacccccccgtcaagccaaatatgccattcattgtatccatgcgatattttctagtaaagagacccagtttgcacagatatttgagcctctgcataagagcctagatccaagcaacctggaacatctcataacaccattggttactattggtcatattgctctccttgcacctgatcaatttgctgctcctttgaaatctttggtagctactttcattgtgaaagatcttctcatgaatgatcggcttccagggaaaaagacaactaaactttgggttccagatgaagaagtatctcctg

SEQ ID NO: 2142 - DNA, 1060 bp, Artificial
  cDNA Sequence
tgactcttggttttattcatttgtatttttattcttttggaatatttttgatgtaatatatgagacagggaccttactttgtttttattccaaatgtctatccagtaatttcaatacagtgtattgactagtctaccttttccctgattacttgaaatattacctttttcatatgctaaatccttaattcagtctttttttctgggcttgttcaattcttacagtttgtttattccagcgtcagtactacatggttttaattattgttggttcttaatattttaacataatgatttgtttaaatgtacttttgtaatactgaaataatctgtattacagcgtgaaataactaagaagttgggcaaccccaaacagcctacaaatcctttcctggaaatgatcaagtttctcttggagaggatagcacctgtgcacatagataccgaatctatcagtgctcttattaaacaagtgaacaaatcaatagatggaacagcagatgatgaagatgagggtgttccaactgatcaagccatcagagcaggtcttgaactgcttaaggtactctcatttacacatcccatctcatttcattctgctgaaacatttgaatcattactggcttgtctgaaaatggatgatgaaaaagtagcagaagctgcactacaaattttcaaaaacacaggaagcaaaattgaagaggattttccacacatcagatcagccttgcttcctgttttacatcacaaatctaaaaaaggacccccccgtcaagccaaatatgccattcattgtatccatgcgatattttctagtaaagagacccagtttgcacagatatttgagcctctgcataagagcctagatccaagcaacctggaacatctcataacaccattggttactattggtcatattgctctccttgcacctgatcaatttgctgctcctttgaaatctttggtagctactttcattgtgaaagatcttctcatgaatgatcggcttccagggaaaaagacaactaaactttgggttccagatgaagaagtatctcctg

SEQ ID NO: 2143 - DNA, 466 bp, Artificial; identical to SEQ ID NO: 1034
  cDNA Sequence

SEQ ID NO: 2144 - DNA, 1303 bp, Artificial
  cDNA Sequence
agaaactgtacactgtgtgtgatgttgccatgaatatcatcatgtcaaagagtactacatacagtttggaatctcctaaagacccggtactaccagctcgtttcttcactcaacctgacaagaatttcagtaacaccaaaaattatctgcctcctgaaatgaaatcatttttcactcctggaaaacctaaaacaaccaatgttctaggagctgttaacaagccactttcatcagcaggcaagcaatctcagaccaaatcatcacgaatggaaactgtaagcaatgcaagcagcagctcaaatccaagctctcctggaagaataaaggggaggcttgatagttctgaaatggatcacagtgaaaatgaagattacacaatgtcttcacctttgccggggaaaaaaagtgacaagagagacgactctgatcttgtaaggtctgaattggagaagcctagaggcaggaaaaaaacgcccgtcacagaacaggaggagaaattaggtatggatgacttgactaagttggtacaggaacagaaacctaaaggcagtcagcgaagtcggaaaagaggccatacggcttcagaatctgatgaacagcagtggcctgaggaaaagaggctcaaagaagatatattagaaaatgaagatgaacagaatagtccgccaaaaaagggtaaaagaggccgaccaccaaaacctcttggtggaggtacaccaaaagaagagccaacaatgaaaacttctaaaaaaggaagcaaaaaaaaatctggacctccagcaccagaggaggaggaagaagaagaaagacaaagtggaaatacggaacagaagtccaaaagcaaacagcaccgagtgtcaaggagagcacagcagagagcagaatctcctgaatctagtgcaattgaatccacacagtccacaccacagaaaggacgaggaagaccatcaaaaacgccatcaccatcacaaccaaaaaaaaatgtgtaagttgtaaatattacatttcaaaccaatttcaaattattttgcaaaagttcctaaatttgtaaacatacatattgctgtatttaaattccatatatttagccccattacactaggtaagataaaatttttataaacttaccttagtgattgatatctcaataaactatcttgtacatttttacaggtgcaggcaaatcttcataaatgaataccaaatagtatattatttcctatacagactttatgatatctaaagaaatcataaggtatttttaaataatcaccacacattgaccaggttgccttgtcattcc

SEQ ID NO: 2145 - DNA, 1082 bp, Artificial
  cDNA Sequence
tccctttggctgtgaagaagtaaaggctatgatattcatcttgacttggggtctgtagtgatgggcatgggagcgagaggtatcgcttctgtttcagtcactctcgctgactccggtggtccatatctcactgaaattccatcttactgggcccagtggcaactcctcatctagctttaaatttggtaatgacttctcacccccccatttgctttaaggaggagtaattattatttccttgctttatcccagatctccactctcagtttttgaatagcagaaacaaagcgttaacacataagtctcctttaatgttattttcctttggttaactcatctttggttaggcatcagggcatgttcacaccttggtgttagcagcaggttctgcacagcttacaggacagtggagagatggggcccagagccacttggaaagaactgtgtgaggaagggactcactgagtcagacaccgtcattttcaaaacacacaattctatataaaattggtattttacatatatacagtaaagatggagatatacacacatatgtacatatgctatacatacatttatttacagttaggtatacgcttcttagaagcctttaaatagcaaattaggcaatgcacaaggaatagtccatttaattttaagtaatatatataaagttctcattttaaaattatattagtagggatgtagccatctccaggaaggctaagaaagttcttggaaattcttgcatctccaacattccaacttcttaacgtttccatttttaggcattaaccgcgtccttcagttcctctttctctcgctttctcacatgcacactctctgccacactcgtcactttagcttcctcttccctgagtttgatgtcacactgggcaaaactcagattttagtttctgggccctcagcaatgaggggctggaaagagtttctaatcctggcaacttctgctgcacacagatgtccaaagcctttgctgtaccattctggggagtgacctctgtctatcctgcagatgtgagtcagtcttgacttgccagagccacacggttctatcaagt

SEQ ID NO: 2146 - DNA, 606 bp, Artificial
  cDNA Sequence
cccagccaccctcttgagaaaggggagaatggccatcagcaatgcagagttcattttataagcatctctcttgtatgtgatctctcatttccttttgaagataaaaggcgagtgatgagtgtccccttggtctagttttcctgtcttctttctgttgtctttcacctaaaaacctagctatgaaaaagcaaggactcagctgggcacatggtgcattagaattcacattccatctgaataatattaaatctccctcttggcatcctgtttatgctaatctttttcgggacttaatgatgtttatcaggacttccatttcctcttctttagaaatgtgctcagctaatgaaggaaggttggttttcttgagaaagaaagattcataagaagagtatgcagcagattcttattctgagcattgcaggttcagcctctcactgcggtgacttcatattcatcaggaataggtataatctattctgtgcacagttgatttagggcagaaataaaagctcagacaacaaagcaaggctcctcttacacactactatgtctgaatacaaatggttcataattgaaggctaaacttcctcatctcacccacag

SEQ ID NO: 2147 - DNA, 648 bp, Artificial
  cDNA Sequence
ggagactctaagacttctgaagagtttcttgcttctttcctgtggggcagtgactccacttcccagcagtaatggaatatcctgaattagctacattaatgttagaaccatttggacctcacccaggacttcaactacattatgctaaagttacagaacccaaatttggcaactgtctgcatctgaacaacagaagtttcaacattctgccaacagagtaactcctggacgattggcacagaagaaggcacaaggcaaatacccatctctgtacaccctgtgctactgtgtcatgtgctgctccaggcaactccaatggattggccaccctggccaatgtgttctagtatgttacgtttatgttcccctgctttctacaatcctgttcaaagagttgctgacttaaccacagagaggattccagaacctgagacacagaataaacttgagcaatcatagtccatccacttcattgtctcatcaaaaaccaaaggtccagtgaagctctggaactcaacgctgtaaaggagcgaaggagcttctatacagagcctggatgcctgtctccttatcctacttcagtggacttgactgcaatccggattatgctgttttctaagcatttaaaataaaataaaaagtataata

SEQ ID NO: 2148 - DNA, 355 bp, Artificial; identical to SEQ ID NO: 1057
  cDNA Sequence

SEQ ID NO: 2149 - DNA, 606 bp, Artificial
  cDNA Sequence
ggccaggcatcccggtcctcgcgcgtggcgcagcctcccagcgccggaccgacccatgtcgcgcccgcattgggtcccgggaccccggcgggagtgccgcgtccgtcctttccagtcgccgggagtctgagtcgcgggccacgcgggagtggcggtggagagcccgccggtcgttatgaggacggatctaaaatgaccagcaaacggaaaccttgccaaacgcagctcaggagatccatcagtgagcagttgcgggactccacggccagagcctgggatctgctgtggaagaacgtccgggagaggcggctggcaggactatctcttgagctgggcagtgaccaccacatggggcagaagaaagttctagagaagaaggtctgatgcctagaaagaaggaaaggacaccactggtgaagcgggagatttaaccttctttgaactcctcccttttttccttacttgaactgtaaagcaagtggtttgctaggtgttctgcccttaaacccatgcacccacatcctcatcagcctgaaagcattctggggaagatgcccagaatctatagcaccttgagagaaggtcactagcaagctaaattagaag

SEQ ID NO: 2150 - DNA, 523 bp, Artificial
  cDNA Sequence
cgggagtgccgcgtccgtcctttccagtcgccgggagtctgagtcgcgggccacgcgggagtggcggtggagagcccgccggtcgttatgaggacggatctaaaatgaccagcaaacggaaaccttgccaaacgcagctcaggagatccatcagtgagcagttgcgggactccacggccagagcctgggatctgctgtggaagaacgtccgggagaggcggctggcagaaattgaggcaaaagaagcatgtgactggctccgtgctgccgggttcccgcaatacgctcagttatatgaggattcacaatttcccatcaacattgtggctgtcaagaatgatcatgattttcttgaaaaggaccttgtagaacctctttgcagacgactaaatacgttgaacaagtgtgcctcaatgaaacttgatgtgaacttccaaaggaaaaagggtgacgactccgatgaggaagatctttgtatcagcaacaaatggactttccaaagaaccagtcgcaggtggtctcg

SEQ ID NO: 2151 - DNA, 628 bp, Artificial
  cDNA Sequence
agaatgatgtggaccagtctcacagacaacagccaagcacagaggaaatattagctggcagagataacgaagagaaaacactcggtgacagatgcaccatctgtcagtttctgaggagcagttttcaagaaagctgaaaatgaattgaagaagagaggggttttgtttgaaaggtacagcacagcctaaggacaattttaaacaaaaaattgaggcaaaagaagcatgtgactggctccgtgctgccgggttcccgcaatacgctcagttatatgaggattcacaatttcccatcaacattgtggctgtcaagaatgatcatgattttcttgaaaaggaccttgtagaacctctttgcagacgactaaatacgttgaacaagtgtgcctcaatgaaacttgatgtgaacttccaaaggaaaaagggtgacgactccgatgaggaagatctttgtatcagcaacaaatggactttccaaagaaccagtcgcaggtggtctcgtgtggacgacctctacacgctgctccctcgaggagacagaaatgggtcaccgggaggcacggggatgaggaacacgaccagcagtgagagcgtcctcacagacctgagcgagcctgaggtctgctcc

SEQ ID NO: 2152 - DNA, 655 bp, Artificial
  cDNA Sequence
agaaattgaggcaaaagaagcatgtgactggctccgtgctgccgggttcccgcaatacgctcagttatatgaggattcacaatttcccatcaacattgtggctgtcaagaatgatcatgattttcttgaaaaggaccttgtagaacctctttgcagacgactaaatacgttgaacaagtgtgcctcaatgaaacttgatgtgaacttccaaaggaaaaagaagagaaaagggaccctttaaggattcgagatgaccttccctgcctctgtaagagtcaggtggaggagtattctcgagcttagctgcacgcctcactggaagactaacaacccagccaagagcatttcaggagacaggacaccagcacttctgccgcctgcagctcgggctctccactcccgcggcattcccagcggcccattcctgcttccaaacaggcaggcccggccacgtagctccagttaacgtctaaatttctatgtgactatggatgcgttgccttttgcagctgtggattcgtgtgggttcctgtttccagtgtaaagatatggccaaattccgtcttttgaaaaaagcccttctttatggaatgtctggttggcatctgtctctgaggaatatataatttcagtgaagaatgttctcatttttaga

SEQ ID NO: 2153 - DNA, 412 bp, Artificial
  cDNA Sequence
cttttagatgcaaattgattttcttggattttcttgctaagagtcatgaagtattagagcacatggatgtcttatagatgatcttgtccaagtcattcattttagaagagctgatggaacttcagagaggttaaattcacctgttgcaggtcacctatctccttagtgacaagtttgagattacagcccaacttcaagtcacactgactcttgtgattataagtgaaatcatacttggccactcattcctgagcaagatgcctgtttctgaaattagtctctagagtaccaacttttcaggagaaaagatggtaccttacttaccttcaagagcaaagcctttcccatgtttcataagtgtttcttggcagcctaactgactcagtgactgattaaaggaaagactgaagga

SEQ ID NO: 2154 - DNA, 477 bp, Artificial
  cDNA Sequence
ctctagcgcattacagctaagtgttagtctatgaatgtaatataacagtggtttaaaatcaacagattgtaacaaaagtccctcacaggagacaaagctggtgccgtgatctctattgcattaatgagacaaatgaggataggaaacatcatgtggcttcccagggctccatggcaggggcgtggcaggggggatttgagtccaggctcctactccagtgctgacctttcccgtcactttcctgctgcccagtgtgagctctatcctgtccagagtcatgaagtattagagcacatggatgtcttatagatgatcttgtccaagtcattcattttagaagagctgatggaacttcagagaggttaaattcacctgttgcaggtcacctatctccttagtgacaagtttgagattacagcccaacttcaagtcacactgactcttgtgattataagtgaaatcatacttggccactca

SEQ ID NO: 2155 - DNA, 648 bp, Artificial
  cDNA Sequence
gagctgtcctgggctgggtgccttgctctttgactgagactggagacagacggcaacagccacaggcagactgaggtggcaataggaaatctgccgagatgttcagtcaggtgcccaggaccccagcctcaggctgctactacctaaattccatgacacctgagggccaggagatgtacttgcgatttgatcagactacaagacgctctccttacaggatgagccggattctagcacgccatcagctagtgactaaaattcaacaagataggaaagtctactgacctccttccctgaaaatttggatcctcatattagcattccattccacttgctgtacttttagttggaaggtctaaggcagacaaagctgcttaaatatttttatcactgacttcctagaagaaggaggaaaaaatcttggcaagaagaagggaaatcagtcttgcagaatatcttgaagaagcctgcgaaggaattccactgactgtgttcattatctattggtcccaatactgagtggaatttttatgtgttatcactggccagggtggccaatccattggagttgcctggagcagcacatgacatggtagcacggggtgtacagagatgggtatttaccttgtgccttcttctgtgccaatc

SEQ ID NO: 2156 - DNA, 457 bp, Artificial
  cDNA Sequence
aaattccatgacacctgagggccaggagatgtacttgcgatttgatcagactacaagacgctctccttacaggatgagccggattctagcacgccatcagctagtgactaaaattcaacaaggtgattgcttgactgactccatcttgaagaatctcttgggatttagtggtaggcagtggctccacaacttcaaaaagctggggatgtatgcatgcagcctccctgagaaataccacaagcgcctgattggaacaatctgtatcaaatgaaagaggagaataaagaactactctgcttcatggaaaacttgagtcaaaacaatctggtcagaaactatttggctgggagagcatctattttctgctttctttttctctcagattgactggggtttggggattgtaaacatttttttctttttaaatactattgggaatacaggcatggaaaatata

SEQ ID NO: 2157 - DNA, 452 bp, Artificial; identical to SEQ ID NO: 1050
  cDNA Sequence

SEQ ID NO: 2158 - DNA, 1577 bp, Artificial
  cDNA Sequence
gagtcatacagaagaaatatgccactgggaagccagatcaaaaggacctcaacgagaatctggcagcagctcaggggctagcgcacatgatcatggaatgcgacagactttttgaggttccacacgagttggtggcccagtctcgtaactcgtatgtggaggctgagatccacgtgccaaccctggaagaattggggacacagctggaggagagtggggcaactttccacacttacctgaaccatctcatccagggcctccagaaagaagccaaggagaagttcaaaggatgggtcacgtgctccagcacggacaatacagatcttgctttcaaaaaggtgggcgacgggaacccgctgaagctgtggaaggcttctgtggaggtggaagcacccccctcagtggtcctgaaccgcgtgctgagagagcgccacctgtgggacgaggactttgtgcagtggaaggttgtggaaactctagacaggcaaacagagatctaccagtatgtgctgaacagcatggctccccatccttccagagactttgtggttctcaggacctggaaaactgatttgcccaaaggaatgtgtaccctggtgtccctctccgtggagcatgaggaagcccagctcctgggtggtgtgcgagcagtggtgatggactcgcagtacttgatagaaccgtgtggctctggcaagtcaagactgactcacatctgcaggatagacctgaaaggtcactccccagaatggtacagcaaaggctttggacatctgtgtgcagcagaagttgccaggattagaaactctttccagcccctcattgctgagggcccagaaactaaaatctgagttttgcccagtgtgacatcaaactcagggaagaggaagctaaagtgacgagtgtggcagagagtgtgcatgtgagaaagcgagagaaagaggaactgaaggacgcggttaatgcctaaaaatggaaacgttaagaagttggaatgttggagatgcaagaatttccaagaactttcttagccttcctggagatggctacatccctactaatataattttaaaatgagaactttatatatattacttaaaattaaatggactattccttgtgcattgcctaatttgctatttaaaggcttctaagaagcgtatacctaactgtaaataaatgtatgtatagcatatgtacatatgtgtgtatatctccatctttactgtatatatgtaaaataccaattttatatagaattgtgtgttttgaaaatgacggtgtctgactcagtgagtcccttcctcacacagttctttccaagtggctctgggccccatctctccactgtcctgtaagctgtgcagaacctgctgctaacaccaaggtgtgaacatgccctgatgcctaaccaaagatgagttaaccaaaggaaaataacattaaaggagacttatgtgttaacgctttgtttctgctattcaaaaactgagagtggagatctgggataaagcaaggaaataataattactcctccttaaagcaaatgggggggtgagaagtcattaccaaattta

SEQ ID NO: 2159 - DNA, 557 bp, Artificial
  cDNA Sequence
gagtcatacagaagaaatatgccactgggaagccagatcaaaaggacctcaacgagaatctggcagcagctcaggggctagcgcacatgatcatggaatgcgacagactttttgaggttccacacgagttggtggcccagtctcgtaactcgtatgtggaggctgagatccacgtgccaaccctggaagaattggggacacagctggaggagagtggggcaactttccacacttacctgaaccatctcatccagggcctccagaaagaagccaaggagaagttcaaaggatgggtcacgtgctccagcacggacaatacagatcttgctttcaaaaaggtgggcgacgggaacccgctgaagctgtggaaggcttctgtggaggtggaagcacccccctcagtggtcctgaaccgcgtgctgagagagcgccacctgtgggacgaggactttgtgcagtggaaggttgtggaaactctagacaggcaaacagagatctaccagtatgtgctgaacagcatggctccccatccttccagagactttgtggttctcagg

SEQ ID NO: 2160 - DNA, 472 bp, Artificial
  cDNA Sequence
ctggacattgctggagccaattagggactggccgaaatcctagagggactgccaggtgggacagccgagggggaacttcgccgtgcgctgaaagggattcccccttaggaaggtgaagttattgatgcattgaagaaaaggacattgtaaatttatttactgactttgattttggtgacaatttcaacactgaaagttgtcaacaatctgatcaacttttcctccattctccacattccttcatccagtgccttcccacctgttctctttcctattgtgttcccaggacgatgggagccttttaacaccaatggagcaggagatgcactgattcacatgcacccaaatacaacaccaaccccacaagctctcagctcaccagtcacagacatcaccttctacggacatatttttatttcactgagctacaactacgggcaaggcaacgacgagctgtgtggagacttcaaaa

SEQ ID NO: 2161 - DNA, 651 bp, Artificial
  cDNA Sequence
gcgcgccaggcggacactcctctcggctcctccccggcagcggcggcggctcggagcgggctccggggctcgggtgcagcggccagcgggcgcctggcggcgaggattacccggggaagtggttgtctcctggctggagccgcgagacgggcgctcagggcgcggggccggcggcggcgaacgagaggacggactctggcggccgggtcgttggccgcggggagcgcgggcaccgggcgagcaggccgcgtcgcgctcaccatggtcagctactgggacaccggggtcctgctgtgcgcgctgctcagctgtctgcttctcacaggatctagttcaggttcaaaattaaaagatcctgaactgagtttaaaaggcacccagcacatcatgcaagcaggccagacactgcatctccaatgcaggggggaagcagcccataaatggtctttgcctgaaatggtgagtaaggaaagcgaaaggctgagcataactaaatctgcctgtggaagaaatggcaaacaattctgcagtactttaaccttgaacacagctcaagcaaaccacactggcttctacagctgcaaatatctagctgtacctacttcaaagaagaaggaaacagaatctgcaatctatatatttattagtggt

SEQ ID NO: 2162 - DNA, 1247 bp, Artificial
  cDNA Sequence
ctacttcaaagaagaaggaaacagaatctgcaatctatatatttattagtgatacaggtagacctttcgtagagatgtacagtgaaatccccgaaattatacacatgactgaaggaagggagctcgtcattccctgccgggttacgtcacctaacatcactgttactttaaaaaagtttccacttgacactttgatccctgatggaaaacgcataatctgggacagtagaaagggcttcatcatatcaaatgcaacgtacaaagaaatagggcttctgacctgtgaagcaacagtcaatgggcatttgtataagacaaactatctcacacatcgacaaaccaatacaatcatagatgtccaaataagcacaccacgcccagtcaaattacttagaggccatactcttgtcctcaattgtactgctaccactcccttgaacacgagagttcaaatgacctggagttaccctgatgaaaaaaataagagagcttccgtaaggcgacgaattgaccaaagcaattcccatgccaacatattctacagtgttcttactattgacaaaatgcagaacaaagacaaaggactttatacttgtcgtgtaaggagtggaccatcattcaaatctgttaacacctcagtgcatatatatgataaagcattcatcactgtgaaacatcgaaaacagcaggtgcttgaaaccgtagctggcaagcggtcttaccggctctctatgaaagtgaaggcatttccctcgccggaagttgtatggttaaaagatgggttacctgcgactgagaaatctgctcgctatttgactcgtggctactcgttaattatcaaggacgtaactgaagaggatgcagggaattatacaatcttgctgagcataaaacagtcaaatgtgtttaaaaacctcactgccactctaattgtcaatgtgaaaccccagatttacgaaaaggccgtgtcatcgtttccagacccggctctctacccactgggcagcagacaaatcctgacttgtaccgcatatggtatccctcaacctacaatcaagtggttctggcacccctgtaaccataatcattccgaagcaaggtgtgacttttgttccaataatgaagagtcctttatcctggatgctgacagcaacatgggaaacagaattgagagcatcactcagcgcatggcaataatagaaggaaagaataagatggctagcaccttggttgtggctgactctaga

SEQ ID NO: 2163 - DNA, 1371 bp, Artificial
  cDNA Sequence
ctacttcaaagaagaaggaaacagaatctgcaatctatatatttattagtgatacaggtagacctttcgtagagatgtacagtgaaatccccgaaattatacacatgactgaaggaagggagctcgtcattccctgccgggttacgtcacctaacatcactgttactttaaaaaagtttccacttgacactttgatccctgatggaaaacgcataatctgggacagtagaaagggcttcatcatatcaaatgcaacgtacaaagaaatagggcttctgacctgtgaagcaacagtcaatgggcatttgtataagacaaactatctcacacatcgacaaaccaatacaatcatagatgtccaaataagcacaccacgcccagtcaaattacttagaggccatactcttgtcctcaattgtactgctaccactcccttgaacacgagagttcaaatgacctggagttaccctgatgaaaaaaataagagagcttccgtaaggcgacgaattgaccaaagcaattcccatgccaacatattctacagtgttcttactattgacaaaatgcagaacaaagacaaaggactttatacttgtcgtgtaaggagtggaccatcattcaaatctgttaacacctcagtgcatatatatgataaagcattcatcactgtgaaacatcgaaaacagcaggtgcttgaaaccgtagctggcaagcggtcttaccggctctctatgaaagtgaaggcatttccctcgccggaagttgtatggttaaaagatgggttacctgcgactgagaaatctgctcgctatttgactcgtggctactcgttaattatcaaggacgtaactgaagaggatgcagggaattatacaatcttgctgagcataaaacagtcaaatgtgtttaaaaacctcactgccactctaattgtcaatgtgaaaccccagatttacgaaaaggccgtgtcatcgtttccagacccggctctctacccactgggcagcagacaaatcctgacttgtaccgcatatggtatccctcaacctacaatcaagtggttctggcacccctgtaaccataatcattccgaagcaaggtgtgacttttgttccaataatgaagagtcctttatcctggatgctgacagcaacatgggaaacagaattgagagcatcactcagcgcatggcaataatagaaggaaagaataagtatttggatataaggactgaggaacagattttttcctttattcagaagactcagacattgaaactcactgtctcatgcaaagctgccttctagtccagccagactacactgatctacaatttgcacctgagctcctttctctggccctataaagttt

SEQ ID NO: 2164 - DNA, 1197 bp, Artificial
  cDNA Sequence
gatacaggtagacctttcgtagagatgtacagtgaaatccccgaaattatacacatgactgaaggaagggagctcgtcattccctgccgggttacgtcacctaacatcactgttactttaaaaaagtttccacttgacactttgatccctgatggaaaacgcataatctgggacagtagaaagggcttcatcatatcaaatgcaacgtacaaagaaatagggcttctgacctgtgaagcaacagtcaatgggcatttgtataagacaaactatctcacacatcgacaaaccaatacaatcatagatgtccaaataagcacaccacgcccagtcaaattacttagaggccatactcttgtcctcaattgtactgctaccactcccttgaacacgagagttcaaatgacctggagttaccctgatgaaaaaaataagagagcttccgtaaggcgacgaattgaccaaagcaattcccatgccaacatattctacagtgttcttactattgacaaaatgcagaacaaagacaaaggactttatacttgtcgtgtaaggagtggaccatcattcaaatctgttaacacctcagtgcatatatatgataaagcattcatcactgtgaaacatcgaaaacagcaggtgcttgaaaccgtagctggcaagcggtcttaccggctctctatgaaagtgaaggcatttccctcgccggaagttgtatggttaaaagatgggttacctgcgactgagaaatctgctcgctatttgactcgtggctactcgttaattatcaaggacgtaactgaagaggatgcagggaattatacaatcttgctgagcataaaacagtcaaatgtgtttaaaaacctcactgccactctaattgtcaatgtgaaaccccagatttacgaaaaggccgtgtcatcgtttccagacccggctctctacccactgggcagcagacaaatcctgacttgtaccgcatatggtatccctcaacctacaatcaagtggttctggcacccctgtaaccataatcattccgaagcaaggtgtgacttttgttccaataatgaagagtcctttatcctggatgctgacagcaacatgggaaacagaattgagagcatcactcagcgcatggcaataatagaaggaaagaataagatggctagcaccttggttgtggctgactctaga

SEQ ID NO: 2165 - DNA, 1321 bp, Artificial
  cDNA Sequence
gatacaggtagacctttcgtagagatgtacagtgaaatccccgaaattatacacatgactgaaggaagggagctcgtcattccctgccgggttacgtcacctaacatcactgttactttaaaaaagtttccacttgacactttgatccctgatggaaaacgcataatctgggacagtagaaagggcttcatcatatcaaatgcaacgtacaaagaaatagggcttctgacctgtgaagcaacagtcaatgggcatttgtataagacaaactatctcacacatcgacaaaccaatacaatcatagatgtccaaataagcacaccacgcccagtcaaattacttagaggccatactcttgtcctcaattgtactgctaccactcccttgaacacgagagttcaaatgacctggagttaccctgatgaaaaaaataagagagcttccgtaaggcgacgaattgaccaaagcaattcccatgccaacatattctacagtgttcttactattgacaaaatgcagaacaaagacaaaggactttatacttgtcgtgtaaggagtggaccatcattcaaatctgttaacacctcagtgcatatatatgataaagcattcatcactgtgaaacatcgaaaacagcaggtgcttgaaaccgtagctggcaagcggtcttaccggctctctatgaaagtgaaggcatttccctcgccggaagttgtatggttaaaagatgggttacctgcgactgagaaatctgctcgctatttgactcgtggctactcgttaattatcaaggacgtaactgaagaggatgcagggaattatacaatcttgctgagcataaaacagtcaaatgtgtttaaaaacctcactgccactctaattgtcaatgtgaaaccccagatttacgaaaaggccgtgtcatcgtttccagacccggctctctacccactgggcagcagacaaatcctgacttgtaccgcatatggtatccctcaacctacaatcaagtggttctggcacccctgtaaccataatcattccgaagcaaggtgtgacttttgttccaataatgaagagtcctttatcctggatgctgacagcaacatgggaaacagaattgagagcatcactcagcgcatggcaataatagaaggaaagaataagtatttggatataaggactgaggaacagattttttcctttattcagaagactcagacattgaaactcactgtctcatgcaaagctgccttctagtccagccagactacactgatctacaatttgcacctgagctcctttctctggccctataaagttt

SEQ ID NO: 2166 - DNA, 624 bp, Artificial
  cDNA Sequence
ggattttactgcggacagttaataacagaacaatgcactacagtattagcaagcaaaaaatggccatcactaaggagcactccatcactcttaatcttaccatcatgaatgtttccctgcaagattcaggcacctatgcctgcagagccaggaatgtatacacaggggaagaaatcctccagaagaaagaaattacaatcagagatcaggaagcaccatacctcctgcgaaacctcagtgatcacacagtggccatcagcagttccaccactttagactgtcatgctaatggtgtccccgagcctcagatcacttggtttaaaaacaaccacaaaatacaacaagagcctgaactgtatacatcaacgtcaccatcgtcatcgtcatcatcaccattgtcatcatcatcatcatcgtcatcatcatcatcatcatagctatcatcattatcatcatcatcatcatcatcatcatagctaccatttattgaaaactattatgtgtcaacttcaaagaacttatcctttagttggagagccaagacaatcataacaataacaaatggccgggcatggtggctcacgcctgtaatcccagcactttgggaggccaaggcaggtggat

SEQ ID NO: 2167 - DNA, 548 bp, Artificial
  cDNA Sequence
ggattttactgcggacagttaataacagaacaatgcactacagtattagcaagcaaaaaatggccatcactaaggagcactccatcactcttaatcttaccatcatgaatgtttccctgcaagattcaggcacctatgcctgcagagccaggaatgtatacacaggggaagaaatcctccagaagaaagaaattacaatcagagatcaggaagcaccatacctcctgcgaaacctcagtgatcacacagtggccatcagcagttccaccactttagactgtcatgctaatggtgtccccgagcctcagatcacttggtttaaaaacaaccacaaaatacaacaagagcctggctctgcaaatacagcagtgaacaagaaaactgaaatctgaagaaccaaaaatctagagtaattaagtgatgcatgtatttacctgaaatacgcttcttcaagcaacaaccctgtgtgtcctgccttattcgctattatcgtgtcaattggtctaaaaatggaataaggcaaattaataaatgggcaatcagaaaaa

SEQ ID NO: 2168 - DNA, 632 bp, Artificial
  cDNA Sequence
ggattttactgcggacagttaataacagaacaatgcactacagtattagcaagcaaaaaatggccatcactaaggagcactccatcactcttaatcttaccatcatgaatgtttccctgcaagattcaggcacctatgcctgcagagccaggaatgtatacacaggggaagaaatcctccagaagaaagaaattacaatcagagatcaggaagcaccatacctcctgcgaaacctcagtgatcacacagtggccatcagcagttccaccactttagactgtcatgctaatggtgtccccgagcctcagatcacttggtttaaaaacaaccacaaaatacaacaagagcctggtaagagacttttttttcttccatttattatttctcatctttcatcagcccccctttcccttaacagtcccgtcacctgcttccagtatgtatagacctacttgctgatagagccccaaacactgggatctggttcatgctgatagcaatgtccagtgaggaatatttgggccagttcctatgcagaccatattcctaacccatagaaagatcctgcagaatctattcagctggaagtctttaaatagtgcattcagaaagaaatgagaagagccatgtag

SEQ ID NO: 2169 - DNA, 453 bp, Artificial
  cDNA Sequence
taggcagagaacaaagattggtggcttcctcctgagcacactgggatgtggcattacatcggggctgctgagtgcccttaccttcagctgcccagatgcagaggcagttccacaaggtactggcacaagaagagtcgtggaagactgacctggccatggcttctcatgtcccagctcaggacctgccacatcaattctccctttcctctggccgtcacgtgtggagtgaaattctcagaagcggctgtccctgtgcacctctctggctgtgtccagaaaatgaacatctgtttacagcttcaattttctaatgattagaatgccacaaacaagaaaacccagaggaaagctgttgatgctgaaatgtttccttcctctacatattccatgatgcgtcctgtggggttatgcaaacagtaatatctcattaaatattctggtctcttgggaata

SEQ ID NO: 2170 - DNA, 817 bp, Artificial
  cDNA Sequence
agccgccttcctagtggagacgcgagtgggggaggagcagtccgaggggaacgtgggttgaacgttgcaactagggtggagatcaagctggaacaggagttccgatcgacccggtaccaagaaggggagtgcccgcggcagggttcattgaaaaaatccttagtgatattgacatgtctcaagtgacataaattagccaatgactcggaatgatggattctccgaagattggaaatggtttgccagtgattggaccagggactgatatagggatatcttcactccacatggtggggtatttgggaaaaaattttgattcagctaaagttccatcagatgagtattgccctgcttgtagagagaagggaaagttaaaagccttaaagacttaccgaattagttttcaagaatctatctttttgtgtgaggatctgcagtgcatctatcctttgggctctaaatcacttaataacctaatttctcctgatttggaagaatgtcacactccacataagcctcagaaaaggaagagcttagaaagcagctataaggattcacttcttttagcaaattccaaaaagactagaaattatattgctattgacggtggaaaagttttgaacagcaaacataatggagaagtatatgacgaaacctcgtcaaacttacctgatagtagtggtcaacagaatccaattaggacagctgattccttggagcggaatgagattttggaagctgatactgttgacatggctactacaaaagatcctgctacagttgatgtctctggaactggcagaccttcccctcaaaa

SEQ ID NO: 2171 - DNA, 675 bp, Artificial
  cDNA Sequence
gagcagtccgaggggaacgtgggttgaacgttgcaactagggtggagatcaagctggaacaggagttccgatcgacccggtaccaagaaggggagtgcccgcggcagggttcattgaaaaaatccttagtgatattgacatgtctcaagtgacataaattagccaatgactcggaatgatggattctccgaagattggaaatggtttgccagtgattggaccagggactgatatagggatatcttcactccacatgaattttgattcagctaaagttccatcagatgagtattgccctgcttgtagagagaagggaaagttaaaagccttaaagacttaccgaattagttttcaagaatctatctttttgtgtgaggatctgcagtgcatctatcctttgggctctaaatcacttaataacctaatttctcctgatttggaagaatgtcacactccacataagcctcagaaaaggaagagcttagaaagcagctataaggattcacttcttttagcaaattccaaaaagactagaaattatattgctattgacggtggaaaagttttgaacagcaaacataatggagaagtatatgacgaaacctcgtcaaacttacctgatagtagtggtcaacagaatccaattaggacagctgattccttggagcggaatga

SEQ ID NO: 2172 - DNA, 471 bp, Artificial
  cDNA Sequence
cggtggctgctgagcccgccatgtaaaaataactaaacatgggcaaaggagatcctaagaagccgagaggcaaaatgtcatcatatgcattttttgtgcaaacttgtcgggaggagcataagaagaagcacccagatgcttcagtcaacttctcagagttttctaagaagtgctcagagaggtggaagaccatgtctgctaaagagaaaggaaaatttgaagatatggcaaaagcggacaaggcccgttatgaaagagaaatgaaaacctatatccctcccaaaggggagacaaaaaagaagttcaaggatcccaatgcacccaagaggcctccttcggccttcttcctcttctgctctgagtatcgcccaaaaatcaaaggagaacatcctggcctgtccattggtgatgttgcgaagaaactgggagagatgtggaataacactgctgcagatgacaagcagccttatg

SEQ ID NO: 2173 - DNA, 877 bp, Artificial
  cDNA Sequence
agagtgcatgttcacaaagggtcatcacacacggagctgcccctccctgtctccctagagcccatcttcgaggccaggggcttttctaccaggattctggggtgtttctcctcctttcctccctcccagatcttctcacgaaaaataactaaacatgggcaaaggagatcctaagaagccgagaggcaaaatgtcatcatatgcattttttgtgcaaacttgtcgggaggagcataagaagaagcacccagatgcttcagtcaacttctcagagttttctaagaagtgctcagagaggtggaagaccatgtctgctaaagagaaaggaaaatttgaagatatggcaaaagcggacaaggcccgttatgaaagagaaatgaaaacctatatccctcccaaaggggagacaaaaaagaagttcaaggatcccaatgcacccaagaggcctccttcggccttcttcctcttctgctctgagtatcgcccaaaaatcaaaggagaacatcctggcctgtccattggtgatgttgcgaagaaactgggagagatgtggaataacactgctgcagatgacaagcagccttatgaaaagaaggctgcgaagctgaaggaaaaatatgaaaaggtaagaagtgtgggtttgcttggtaaaatgatgacaagtacgccagatgtatgattgtacttagtttgaggtgtaataagtttttagggtaacagctacattaagtatggtgttgatataagtcctcatccttcaaagaatgcagaggaccaaataaattagggtttttttgactaaaatgtaatcagactcagacaaaggctgtgtacatttatgttggttttgttattccccagtatcttgaagttcatg

SEQ ID NO: 2174 - DNA, 923 bp, Artificial
  cDNA Sequence
agcggagagagtgaggaggctgcgtctggctcccgctctcacagccattgcagtacattgagctccatagagacagcaccggggcaagtgagagccggacgggcactgggcgactctgtgcctcgctgaggaaaaataactaaacatgggcaaaggagatcctaagaagccgagaggcaaaatgtcatcatatgcattttttgtgcaaacttgtcgggaggagcataagaagaagcacccagatgcttcagtcaacttctcagagttttctaagaagtgctcagagaggtggaagaccatgtctgctaaagagaaaggaaaatttgaagatatggcaaaagcggacaaggcccgttatgaaagagaaatgaaaacctatatccctcccaaaggggagacaaaaaagaagttcaaggatcccaatgcacccaagaggcctccttcggccttcttcctcttctgctctgagtatcgcccaaaaatcaaaggagaacatcctggcctgtccattggtgatgttgcgaagaaactgggagagatgtggaataacactgctgcagatgacaagcagccttatgaaaagaaggctgcgaagctgaaggaaaaatatgaaaaggatattgctgcatatcgagctaaaggaaagcctgatgcagcaaaaaagggagttgtcaaggctgaaaaaagcaagaaaaagaaggaagaggaggaagatgaggaagatgaagaggatgaggaggaggaggaagatgaagaagatgaagatgaagaagaagatgatgatgatgaataagttggttctagcgcagttttttttttcttgtctataaagcatttaacccccctgtacacaactcactccttttaaagaaaaaaattgaaatgtaaggctgtgtaagatttgtttttaaactgtacagtgt

SEQ ID NO: 2175 - DNA, 331 bp, Artificial; identical to SEQ ID NO: 960
  cDNA Sequence

SEQ ID NO: 2176 - DNA, 542 bp, Artificial
  cDNA Sequence
ctctttgtcttgagggggctgttgagtggtcgcggacctgggctctgtgcgttgggaaagggaagtggaggtctctgaaagaagatgaatttggctgagatttgtgataatgcaaagaaaggaagagaatatgcccttcttggaaattacgactcatcaatggtatattaccagggggtgatgcagcagattcagagacattgccagtcagtcagagatccagctatcaaaggcaaatggcaacaggttcggcaggaattattggaggaatatgaacaagttaaaagtattgtcagcactttagaaagttttaaaattgacaagcctccagatttccctgtgtcctgtcaagatgaaccatttagagatcctgctgtttggccaccccctgttcctgcagaacacagagctccacctcagatcaggcgtcccaatcgagaagtaagacctctgaggaaagaaatggcaggagtaggagcccggggacctgtaggccgagcacatcctatatcaaagagtgaaaagccttctacaagtaggga

SEQ ID NO: 2177 - DNA, 512 bp, Artificial
  cDNA Sequence
tttaggtctctgaaagaagatgaatttggctgagatttgtgataatgcaaagaaaggaagagaatatgcccttcttggaaattacgactcatcaatggtatattaccagggggtgatgcagcagattcagagacattgccagtcagtcagagatccagctatcaaaggcaaatggcaacaggttcggcaggaattattggaggaatatgaacaagttaaaagtattgtcagcactttagaaagttttaaaattgacaagcctccagatttccctgtgtcctgtcaagatgaaccatttagagatcctgctgtttggccaccccctgttcctgcagaacacagagctccacctcagatcaggcgtcccaatcgagaagtaagacctctgaggaaagaaatggcaggagtaggagcccggggacctgtaggccgagcacatcctatatcaaagagtgaaaagccttctacaagtagggacaaggactatagagcaagagggagagatgacaagg

SEQ ID NO: 2178 - DNA, 660 bp, Artificial
  cDNA Sequence
ggccgcggctgccatggcaacactacgccgccgccgccttttcacgcacgtcgcgagctaacggactcggcggcggcggcggcggcggcctgcgccccacccgcaccccatctggaccgcatcgctgaatgtgcccggacctgcgccttctgggtctctgaaagaagatgaatttggctgagatttgtgataatgcaaagaaaggaagagaatatgcccttcttggaaattacgactcatcaatggtatattaccagggggtgatgcagcagattcagagacattgccagtcagtcagagatccagctatcaaaggcaaatggcaacaggttcggcaggaattattggaggaatatgaacaagttaaaagtattgtcagcactttagaaagttttaaaattgacaagcctccagatttccctgtgtcctgtcaagatgaaccatttagagatcctgctgtttggccaccccctgttcctgcagaacacagagctccacctcagatcaggcgtcccaatcgagaagtaagacctctgaggaaagaaatggcaggagtaggagcccggggacctgtaggccgagcacatcctatatcaaagagtgaaaagccttctacaagtagggacaaggactatagagcaagagggagagatgacaagg

SEQ ID NO: 2179 - DNA, 797 bp, Artificial
  cDNA Sequence
aaactttgagcggaccgggacagaaaaaaaaatctctctttgtcttgagggggctgttgagtggtcgcggacctgggctctgtgcgttgggaaagggaagtggaggtgagcctcgggcttcccgccctgtagctgggcccgccccagttgcagcgctcagccccaccccggctgggccaccgccctgcacagtctcagggatgagcagccgcccaagctgcagggcctcgggtcttcggcgcctctgaccctcgcaggttgctgcctttcggtgcagaaccgtatgtatgtcacacattggatgtgagacctgagaaaccgtgttttaacaggtctctgaaagaagatgaatttggctgagatttgtgataatgcaaagaaaggaagagaatatgcccttcttggaaattacgactcatcaatggtatattaccagggggtgatgcagcagattcagagacattgccagtcagtcagagatccagctatcaaaggcaaatggcaacaggttcggcaggaattattggaggaatatgaacaagttaaaagtattgtcagcactttagaaagttttaaaattgacaagcctccagatttccctgtgtcctgtcaagatgaaccatttagagatcctgctgtttggccaccccctgttcctgcagaacacagagctccacctcagatcaggcgtcccaatcgagaagtaagacctctgaggaaagaaatggcaggagtaggagcccggggacctgtaggccgagcacatcctatatcaaagagtgaaaagccttctacaa

SEQ ID NO: 2180 - DNA, 919 bp, Artificial
  cDNA Sequence
cactgacatctaaatacagaggtgaatctgagaagttagttcgtctgttgtttgagatggctagattttatgcccctaccacgatcttcattgatgagatagattctatctgcagtcgaagaggaacctctgatgaacatgaggcaagtcgcagggtcaagtctgaactgctcattcagatggatggagttggaggagctttagaaaatgatgatccttccaaaatggttatggtattggctgctactaatttcccgtgggacattgatgaagctttgcgaagaaggttagaaaaaaggatatatatacctctcccaacagcaaaaggaagagctgagcttctgaagatcaaccttcgtgaggtcgaattagatcctgatattcaactggaagatatagccgagaagattgagggctattctggtgctgacatcactaatgtttgcagggatgcctctttaatggcaatgagacggcgtatcaatggcttaagtccagaagaaatccgtgcactttctaaagaggaacttcagatgcctgttaccaaaggagactttgaattggccctaaagaaaattgctaagtctgtctctgctgcagacttggagaagtatgaaaaatggatggttgaatttggatctgcttgaatttctgtcagctctttaatttctggtatttttgttgataaaatacgaagaaattcctgcaatttttaaaaaacaagtttggaatttttttcagtggagtggttttcgcttaaaggaaaaaaaaatctaaaactgcgaagaatactaaatgtagttgagaaataattgatggcgagagtttgctagtctccctccccggctttgtgctggtattccacgtattcctgcattaatattgcacacccaaaccagtctatcagggaggctgaagc

SEQ ID NO: 2181 - DNA, 1319 bp, Artificial
  cDNA Sequence
ggctcacgcgtcgatgtgtagctacatagttatctgtgtacatccacgctggggcatttttctcctgcttaatgaggacttgactcgggagcaagtgtgaatcattgccggggctgggaaaggaggaaggcgcatttaaccccctcccacccctctccatgtccgtgtgtcactcggctcggtccacctggcgcggccggtcctggggctgctgctgctgttgacgacgacgacgacgacgggggctgcctctgctgtcccgggagtttcctcctgctccggccacacagctcctggggattgttcctcttcgaaccagaacctcggcctgaccggcactttggctccaaaataactttatttttgggggagaaagcacatcacgaaccagtcaaaatcgtggtttatttctgtaacgtgaagacttctgctcttttttctttgtttgtttttttcgtaaacatctgggtgtatatcaaacggcaagatgtccagtaatgtcccggcggatatgataaatttgcgcctcattttggtaagcggaaaaacaaaagagttcctgttttctcctaacgattctgcttctgacattgcaaagcatgtatatgacaattggccaatggactgggaagaagagcaggtcagcagtccaaatattctacgacttatttatcaaggacgatttctacatggaaatgtcacattaggagcattaaaacttccttttggcaaaacaacagtgatgcatttggtggccagagagacattaccagagccaaactctcaaggtcagaggaatcgtgagaagactggagagagtaattgttgtgtaatcctgtaaacactgtctgcctagtgtgatgtgatatagtctttgtctttcatgctgctgggacagaaaagacccgacattgcttcagaaaccgttcagaacagtctgcctgtaaacacatggaactgaattaccacatgaacactgtcatcttttctcatgaaagtaaaaagaaccaagaacatttttcactctgattttttatttcttgtattttttgttgagctgttttaacacatattggtttttgaatgcagtcaatctccaggggaaaagttaacaagttatctttcgtagcagaaaccattttgctgccacaaaattttcatcatcagaactaataaatcaagtgttccaaatacaatttgcattaaaaagattggcattattttcctcatcagcagaatttataacagtgtgtggtatctagaaatacttatatatacaattccacactggaagacactcagcaattaatgaagttaat

SEQ ID NO: 2182 - DNA, 790 bp, Artificial
  cDNA Sequence
ggctcacgcgtcgatgtgtagctacatagttatctgtgtacatccacgctggggcatttttctcctgcttaatgaggacttgactcgggagcaagtgtgaatcattgccggggctgggaaaggaggaaggcgcatttaaccccctcccacccctctccatgtccgtgtgtcactcggctcggtccacctggcgcggccggtcctggggctgctgctgctgttgacgacgacgacgacgacgggggctgcctctgctgtcccgggagtttcctcctgctccggccacacagctcctggggattgttcctcttcgaaccagaacctcggcctgaccggcactttggctccaaaataactttatttttgggggagaaagcacatcacgaaccagtcaaaatcgtggtttatttctgtaacgtgaagacttctgctcttttttctttgtttgtttttttcgtaaacatctgggtgtatatcaaacggcaagatgtccagtaatgtcccggcggatatgataaatttgcgcctcattttggtaagcggaaaaacaaaagagttcctgttttctcctaacgattctgcttctgacattgcaaagcatgtatatgacaattggccaatggactgggaagaagagcaggtcagcagtccaaatattctacgacttatttatcaaggacgatttctacatggaaatgtcacattaggagcattaaaacttccttttggcaaaacaacagtgatgcatttggtggccagagagacattaccagagccaaactctcaaggt

SEQ ID NO: 2183 - DNA, 480 bp, Artificial
  cDNA Sequence
gactgggaagaagagcaggtcagcagtccaaatattctacgacttatttatcaaggacgatttctacatggaaatgtcacattaggagcattaaaacttccttttggcaaaacaacagtgatgcatttggtggccagagagacattaccagagccaaactctcaaggtcagaggaatcgtgagaagactggagagagtaattgttgtgtaatcctgtaaacactgtctgcctagtgtgatgtgatatagtctttgtctttcatgctgctgggacagaaaagacccgacattgcttcagaaaccgttcagaacagtctgcctgtaaacacatggaactgaattaccacatgaacactgtcatcttttctcatgaaagtaaaaagaaccaagaacatttttcactctgattttttatttcttgtattttttgttgagctgttttaacacatattggtttttgaatgcagtcaatctccaggg

SEQ ID NO: 2184 - DNA, 614 bp, Artificial
  cDNA Sequence
tctgtatttaaagattccaaatcaggcttccatctggagcaccagttgagtgaagttgcattgcagacagccctcgcaagctcttcaaggcactatgctggtcggtccttccagatattccgggccctcaagcaacctctccctggatctctttgcaccaaaaatggtccagatagactctttttaaggatcttggctgctttttactagaaggttgcttttatgagcatatttatactgctgaaggatgagtgttaattttaattaactttgccgttttgtagagaaaactattcacaagataaattccaagtcttttcacctgtcaggcatgcatattttaatatctgtttggatagtcagaagtagaatcataaaggtaaaatatgagttgttactttgtttcttcgatgtcatattttatgtgtaatatatatgtaaagggccattcttaagttctctccttaaacttaatgctgtcaagtgttagatgtgtgcatgtgaacttgttgcactgcagaaacatattcagagtttatctatgtaacttattcactctgtaaatacatttaaagtttttgtgatgtaagcttaattgatattctgttcagaac

SEQ ID NO: 2185 - DNA, 568 bp, Artificial
  cDNA Sequence
cagatattccgggccctcaagcaacctctgtcagcacatgccttatctgaccttctctcaagattggtggaggtgataggagaacatggagatgagattcagggttatgtaatggaagcgctcctaaccttggaggcggctgtggataacttgtctgactgcttgaagaacagtgacctcctaactgtattgtcccgctcttcctcaccagatttaagctccagcagtaaactaacagcaagcagaaagagcacaggacaactaaacatgaacccgggaaccaccagcggcaacaccgcaactgccgaacggagccggcatcaacgaagcttctctgtgcccaagaagtttggtgtcatcgaccgatcctctgacccacctcgaagtgccacactggacagaattcaggcttgtacccaacaaggcctctcctcaaaaaccagaagctcatcctccttgaaggacagtctcacggacccatcccacataaaccatcccaccaacctgctggccaccatattctgggtcacagtggccttgatggagtctgattttgagtttgaatact

SEQ ID NO: 2186 - DNA, 832 bp, Artificial
  cDNA Sequence
ggaaaaggccccagtattctcagaagagaacaaaagagaagttggtacatgtcctttctctgtgtggccaagaagtaggattgagcaaaaatccatcagtgattttttcatcgtgtggggatctggatctgcttgagcaccagacaagcttggtatcttctgaggacggtgcccgagagcaggagaacatggatgacacaaacagcgagcagcagtttagagtcttcagagacttcgacttcctagatgtggagctggaggatggagagggtgagagtatggacaatttcaactggggagtgcgcagacgttctctggacagcctggataagtgtgatatgcagattctggaggagcgccaactgtcaggaagcactcctagcctgaataaaatgcaccatgaggactccgatgaatcatccgaggaggaggacctcacagccagccagatcctggagcactcagacctaatcatgactctctccccctctgaagagacgaatcccatggagctgctcaccacagcctgtgactcgacccctgcagaacctcattcctttaacaccagaatgtccagctttgatgcttccttgcctgatatgaataatctgcagatttctgagggttcaaaggctgaagctgttcgtgaggaggaggacaccaccgtgcatgaggatgatctttctagttccatcaatgaactcccagcagcttttgaatgcagcgacagctttagcctggacatgactgagggggaagaaaaaggcaatcgggcactggaccagtttaccctggcgaggtaatggagcccttggctgatgtgagtggtgtg

SEQ ID NO: 2187 - DNA, 442 bp, Artificial
  cDNA Sequence
gagccaattacaatttttcgtagcacaaacaaccaaagggagaacggtttctcaggagaggactcttgattcgcaggtgattttttcatcgtgtggggatctggatctgcttgagcaccagacaagcttgcctggataagtgtgatatgcagattctggaggagcgccaactgtcaggaagcactcctagcctgaataaaatgcaccatgaggactccgatgaatcatccgaggaggaggacctcacagccagccagatcctggagcactcagacctaatcatgactctctccccctctgaagagacgaatcccatggagctgctcaccacagcctgtgactcgacccctgcagaacctcattcctttaacaccagaatgtccagctttgatgcttccttgcctgatatgaataatctgcagatttctgagggttcaaaggt

SEQ ID NO: 2188 - DNA, 805 bp, Artificial
  cDNA Sequence
aattacaatttttcgtagcacaaacaaccaaagggagaacggtttctcaggagaggactcttgattcgcaggtgattttttcatcgtgtggggatctggatctgcttgagcaccagacaagcttggtatcttctgaggacggtgcccgagagcaggagaacatggatgacacaaacagcgagcagcagtttagagtcttcagagacttcgacttcctagatgtggagctggaggatggagagggtgagagtatggacaatttcaactggggagtgcgcagacgttctctggacagcctggataagtgtgatatgcagattctggaggagcgccaactgtcaggaagcactcctagcctgaataaaatgcaccatgaggactccgatgaatcatccgaggaggaggacctcacagccagccagatcctggagcactcagacctaatcatgactctctccccctctgaagagacgaatcccatggagctgctcaccacagcctgtgactcgacccctgcagaacctcattcctttaacaccagaatgtccagctttgatgcttccttgcctgatatgaataatctgcagatttctgagggttcaaaggctgaagctgttcgtgaggaggaggacaccaccgtgcatgaggatgatctttctagttccatcaatgaactcccagcagcttttgaatgcagcgacagctttagcctggacatgactgagggggaagaaaaaggcaatcgggcactggaccagtttaccctggcgaggtaatggagcccttggctgatgtgagtggtgtg

SEQ ID NO: 2189 - DNA, 1113 bp, Artificial
  cDNA Sequence
tggagctggaggatggagagggtgagagtatggacaatttcaactggggagtgcgcagacgttctctggacagcctggataagtgtgatatgcagattctggaggagcgccaactgtcaggaagcactcctagcctgaataaaatgcaccatgaggactccgatgaatcatccgaggaggaggacctcacagccagccagatcctggagcactcagacctaatcatgactctctccccctctgaagagacgaatcccatggagctgctcaccacagcctgtgactcgacccctgcagaacctcattcctttaacaccagaatgtccagctttgatgcttccttgcctgatatgaataatctgcagatttctgagggttcaaaggctgaagctgttcgtgaggaggaggacaccaccgtgcatgaggatgatctttctagttccatcaatgaactcccagcagcttttgaatgcagcgacagctttagcctggacatgactgagggggaagaaaaaggcaatcgggcactggaccagtttaccctggcgagcccgcagcctgtgacgatgccgaggaggcctggcgcagccacatcaaccagcttatgtgtgactcagatggctcctgtgctgtgtatacatttcatgtgttctcctccttgtttaagaatattcagaaaaggttctgcttcctaacctgtgatgcagccagttaccttggagataacctccggggaatcggatccaaatttgtcagctcttcccagatgctcacctcctgctctgaatgtcctacactttttgtggatgccgagactctcctttcatgtggacttctggacaagctcaagttcagtgtgttagaactgcaagaatatttggatacctacaacaacaggaaagaggccacactctcttggcttgcaaattgtaaggcaacatttgcagggggatcaagagatggagtaattacctgtcaaccaggggactccgaagaaaagcaattggaactgtgtcagagattatataagctacacttccagctgctattgctttttcagtcctactgtaagctcatcggccaggtgcacgaagttagctccatgccagaggt

SEQ ID NO: 2190 - DNA, 1145 bp, Artificial
  cDNA Sequence
tggagctggaggatggagagggtgagagtatggacaatttcaactggggagtgcgcagacgttctctggacagcctggataagtgtgatatgcagattctggaggagcgccaactgtcaggaagcactcctagcctgaataaaatgcaccatgaggactccgatgaatcatccgaggaggaggacctcacagccagccagatcctggagcactcagacctaatcatgactctctccccctctgaagagacgaatcccatggagctgctcaccacagcctgtgactcgacccctgcagaacctcattcctttaacaccagaatgtccagctttgatgcttccttgcctgatatgaataatctgcagatttctgagggttcaaaggctgaagctgttcgtgaggaggaggacaccaccgtgcatgaggatgatctttctagttccatcaatgaactcccagcagcttttgaatgcagcgacagctttagcctggacatgactgagggggaagaaaaaggcaatcgggcactggaccagtttaccctggcgagctttggagaaggtgacaggggagtctctccccctccctcgcccttcttctcagccatccttgccgcctttcagcccgcagcctgtgacgatgccgaggaggcctggcgcagccacatcaaccagcttatgtgtgactcagatggctcctgtgctgtgtatacatttcatgtgttctcctccttgtttaagaatattcagaaaaggttctgcttcctaacctgtgatgcagccagttaccttggagataacctccggggaatcggatccaaatttgtcagctcttcccagatgctcacctcctgctctgaatgtcctacactttttgtggatgccgagactctcctttcatgtggacttctggacaagctcaagttcagtgtgttagaactgcaagaatatttggatacctacaacaacaggaaagaggccacactctcttggcttgcaaattgtaaggcaacatttgcagggggatcaagagatggagtaattacctgtcaaccaggggactccgaagaaaagcaattggaactgtgtcagagattatataagctacacttccagctgctattgctttttcagtcctactgtaag

SEQ ID NO: 2191 - DNA, 1364 bp, Artificial
  cDNA Sequence
tggagctggaggatggagagggtgagagtatggacaatttcaactggggagtgcgcagacgttctctggacagcctggataagtgtgatatgcagattctggaggagcgccaactgtcaggaagcactcctagcctgaataaaatgcaccatgaggactccgatgaatcatccgaggaggaggacctcacagccagccagatcctggagcactcagacctaatcatgactctctccccctctgaagagacgaatcccatggagctgctcaccacagcctgtgactcgacccctgcagaacctcattcctttaacaccagaatgtccagctttgatgcttccttgcctgatatgaataatctgcagatttctgagggttcaaaggctgaagctgttcgtgaggaggaggacaccaccgtgcatgaggatgatctttctagttccatcaatgaactcccagcagcttttgaatgcagcgacagctttagcctggacatgactgagggggaagaaaaaggcaatcgggcactggaccagtttaccctggcgagctttggagaaggtgacaggggagtctctccccctccctcgcccttcttctcagccatccttgccgcctttcagcccgcagcctgtgacgatgccgaggaggcctggcgcagccacatcaaccagcttatgtgtgactcagatggctcctgtgctgtgtatacatttcatgtgttctcctccttgtttaagaatattcagaaaaggttctgcttcctaacctgtgatgcagccagttaccttggagataacctccggggaatcggatccaaatttgtcagctcttcccagatgctcacctcctgctctgaatgtcctacactttttgtggatgccgagactctcctttcatgtggacttctggacaagctcaagttcagtgtgttagaactgcaagaatatttggatacctacaacaacaggaaagaggccacactctcttggcttgcaaattgtaaggcaacatttgcagggggatcaagagatggagtaattacctgtcaaccaggggactccgaagaaaaggtaataaaagcctgttagaatgggtctcttgtgtgctctaacattgtgtattagttttggtctacccaagaagcctggaacttgagaaaagaagaggcggaatgagtcaccccaaacatttacatgaaaccaacagagtaagacagaatgccttccagcatgactgtgtgttgatgggatttgtggggaggtttcttcgttttggaaaagtagaggtataaaataaccttttttgctggatactgtctaactatactaataatttcctaataaatttattcttaattcaga

SEQ ID NO: 2192 - DNA, 1364 bp, Artificial; identical to SEQ ID NO: 2191
  cDNA Sequence

SEQ ID NO: 2193 - DNA, 1784 bp, Artificial
  cDNA Sequence
cctgtgccatgcttgctgtgtagcaaatggaatctcttgcacaattggaactgtgtcagagattatataagctacacttccagctgctattgctttttcagtcctactgtaagctcatcggccaggtgcacgaagttagctccatgccagagctgctgaatatgtccagggaactgagtgacctaaagaaacacctgaaggaagccagtgcagtcattgcagctgaccctctctattcagacggcgcgtggtccgagcccaccttcacgtccactgaagcagccatccagtccatgctggagtgcctgaagaacaacgaactcggcaaagctttgcggcagatcagggagtgcagaagtctgtggcccaatgacatctttggaagcagttctgatgatgaggtccagacactactgaatatttatttccgtcaccaaactctgggacagacgggtacttatgccctggtggggtctaaccagagcctgaccgagatctgcaccaagctgatggagctgaacatggagatccgggacatgatccgcagggcccagagttaccgagtcctcactacttttcttccagactccagtgtttctggcactagtctctgacaggagcctcctgtccccactgggttccaaactggcagtgctgccatgctggggcaacgtcattcagtgtcttctcggccttcaaaaggcttggacagactgttctccctcttgttacctgtagggctttttctaaagaggatggcagaacttccaacgtgtagcaatactataagaaccaaggtagcttagaacgtcctggacagactccactcatcatgctgtgtggcacaaatgtgttacatttgaccgagcatatgcaactcgctactgaagaagtgacttccgttgcataccaaagccgactacactgaacagtaccttcctttctagaaacaattttagattggcaaaagtgcaatgttttcttcactcaaaaaattttatattctcaaacatgtatattctttccctgtcttgttccattttcttttcttttttcttttttctttttcctttctttcgtgggctgagaaaggggcaggcaaaatgaagctggccactgaaaactgtaagatggtcaaaagctgacagcctgtgtatgtgaaaagggaattgtaaatggactgcaatgtaatgtacactgtaatttgaatacaattactgtatctaaaaggagctgctatgaagtacctttcttatgttgctaggctactgtttctgaaagccctggatctctttgcaccaaaaatggtccagatagactctttttaaggatcttggctgctttttactagaaggttgcttttatgagcatatttatactgctgaaggatgagtgttaattttaattaactttgccgttttgtagagaaaactattcacaagataaattccaagtcttttcacctgtcaggcatgcatattttaatatctgtttggatagtcagaagtagaatcataaaggtaaaatatgagttgttactttgtttcttcgatgtcatattttatgtgtaatatatatgtaaagggccattcttaagttctctccttaaacttaatgctgtcaagtgttagatgtgtgcatgtgaacttgttgcactgcagaaacatattcagagtttatctatgtaacttattcactctgtaaatacatttaaagtttttgtgatgtaagcttaattgatattctgttcagaactttctttagactaaaaaaaaaaaaaaaga

SEQ ID NO: 2194 - DNA, 1763 bp, Artificial
  cDNA Sequence
atcctatctgaatttaccaaggtattaagcttatgcttaaccacacccataagatcctttttttttccttttgggatgtaaaattcccccagcacctaaatatagtttaaaaaacatttttttttaaatagctgctgaatatgtccagggaactgagtgacctaaagaaacacctgaaggaagccagtgcagtcattgcagctgaccctctctattcagacggcgcgtggtccgagcccaccttcacgtccactgaagcagccatccagtccatgctggagtgcctgaagaacaacgaactcggcaaagctttgcggcagatcagggagtgcagaagtctgtggcccaatgacatctttggaagcagttctgatgatgaggtccagacactactgaatatttatttccgtcaccaaactctgggacagacgggtacttatgccctggtggggtctaaccagagcctgaccgagatctgcaccaagctgatggagctgaacatggagatccgggacatgatccgcagggcccagagttaccgagtcctcactacttttcttccagactccagtgtttctggcactagtctctgacaggagcctcctgtccccactgggttccaaactggcagtgctgccatgctggggcaacgtcattcagtgtcttctcggccttcaaaaggcttggacagactgttctccctcttgttacctgtagggctttttctaaagaggatggcagaacttccaacgtgtagcaatactataagaaccaaggtagcttagaacgtcctggacagactccactcatcatgctgtgtggcacaaatgtgttacatttgaccgagcatatgcaactcgctactgaagaagtgacttccgttgcataccaaagccgactacactgaacagtaccttcctttctagaaacaattttagattggcaaaagtgcaatgttttcttcactcaaaaaattttatattctcaaacatgtatattctttccctgtcttgttccattttcttttcttttttcttttttctttttcctttctttcgtgggctgagaaaggggcaggcaaaatgaagctggccactgaaaactgtaagatggtcaaaagctgacagcctgtgtatgtgaaaagggaattgtaaatggactgcaatgtaatgtacactgtaatttgaatacaattactgtatctaaaaggagctgctatgaagtacctttcttatgttgctaggctactgtttctgaaagccctggatctctttgcaccaaaaatggtccagatagactctttttaaggatcttggctgctttttactagaaggttgcttttatgagcatatttatactgctgaaggatgagtgttaattttaattaactttgccgttttgtagagaaaactattcacaagataaattccaagtcttttcacctgtcaggcatgcatattttaatatctgtttggatagtcagaagtagaatcataaaggtaaaatatgagttgttactttgtttcttcgatgtcatattttatgtgtaatatatatgtaaagggccattcttaagttctctccttaaacttaatgctgtcaagtgttagatgtgtgcatgtgaacttgttgcactgcagaaacatattcagagtttatctatgtaacttattcactctgtaaatacatttaaagtttttgtgatgtaagcttaattgatattctgttcagaactttctttagactaaaaaaaaaaaaaaaga

SEQ ID NO: 2195 - DNA, 1295 bp, Artificial
  cDNA Sequence
gggcgcagcgagcgcagcgcagcgcagggagcgcaggcggtggcggcaccaggttcccggggctccagcgctcggcgcagcgaagtagcctccggcggtggcaactacggcggcggcgccggggcgatgctgtgggtctcgttgggcgccggtgtcctggcctcttcctcagaacgaagaacaaactaaattcatctcaaaatgattataaatcatcaagaaggagtagcctgccacctgaactactcataggaaatgacattagaggaagacttcaaagaaacattaagaacttggatcccattcacctgaggcacccgaagaagagaccatccatatttccaggacggaaacacaccctttccttaggcgtcctgcgtcccccgattcctgctccctggttgccgcgtccttggctggcgtcagaaaaatggctacaaactttctagtaggtgagaagatctggttccacaagttcaaatatggcgatgcagaaaggagattctacgaacagatgaacgggcctgtggccggcgcctccctccaggaggccagcatgatcctccatgatattgccagagccagagagaacatcccgaaatccctggccggaagcttaggcccaggggcgtctagcggccccagcggagaccacagcgagctcgtcgtccggatcgccagtctggaagtggacaaccagagagacctggctgaacgtgctggagaagagcttgcccggccactgggccacagccccgcagacccagcacatgtctcccatgcgccaagtggagcccccggccaagaagctagccacaccagcagaggatgacgaggacgatgacattgacctgtttggcagcgacaatgaggcaacacagctgcggcattaccaatgaggagcggctgcagcagtacgcggagaagaaggccaagaagcccgcgctggtggccaagtcctccatcctgctggacttcaagccttgggacgatgagacggacacggcccacctggaggcctgtgtgcgcttcatccagccggacgggctggtgcggggggcctccaagctggtgcccgtgggctacggtatctggaagctgcagattcagcgtgtggtggaggacaaggtggggacagacttgctggaggaggagatcaccaagtttgaagagtgtatgcagagtgtcgacatcgcagctttcaacaagatctggcctgagtgtgtgtgtgtgcccgcgtgcatgaggccctgacacaattaaaaactgagaccggcaaaaaaaaaaaaaaaaaa

SEQ ID NO: 2196 - DNA, 562 bp, Artificial
  cDNA Sequence
gcgctcggcgcagcgaagtagcctccggcggtggcaactacggcggcggcgccggggcgatgctgtgggtctcgttgggcgccggtgtcctggcctcttcctcagatgaaaagattctgaagaatagagatcttgaacatagcatggtgccagacacataacagaacgaagaacaaactaaattcatctcaaaatgattataaatcatcaagaaggagtagcctgccacctgaactactcataggaaatgacattagaggaagacttcaaagaaacattaagaacttggatcccattcacctgaggcacccgaagaagagaccatccatatttccaggacggaaacacaccctttccttaggcgtcctgcgtcccccgattcctgctccctggttgccgcgtccttggctggcgtcagaaaaatggctacaaactttctagtaggtgagaagatctggttccacaagttcaaatatggcgatgcagaaaggagattctacgaacagatgaacgggcctgtggccggcgcctccctccaggaggccagcatgatcctccatga

SEQ ID NO: 2197 - DNA, 540 bp, Artificial
  cDNA Sequence
agttcaggtggggtcttcctcggttgcgtacctggctggagccgagctggtgggcggccggcagccggcgtttctggtgatgacagccccgaaatgaaagcagcgcggccgccgcctccgagggctgcagggagatcagcgtccagcaaataagaagcaagtcctggacccggaggaggaggagcggccgagcatctctctctgctccgccgtgtcctttagatgagcactcccggccggagccggaggtggatccgcagagctgcctctgggcgcctgaccccgcgctgacatcacaacctgtgacaggcgcatcacgcccggtacctgctcccggccgctgcccgtcctcccagcctctttgtatgccgcagacatggccagccagcaggattcgggcttctttgagatcagtatcaaatatttactgaaatcctggagtaatacttctcccgttggcaacggttacatcaagcctccggttccacctgcttctggcacgcacagggagaaagggccgccaaccatgctacccatcaa

SEQ ID NO: 2198 - DNA, 502 bp, Artificial; identical to SEQ ID NO: 1006
  cDNA Sequence

SEQ ID NO: 2199 - DNA, 248 bp, Artificial
  cDNA Sequence
ctcgactgcttcctgatgggatgtcaaaacttgaacttattgacttactggctaggctctctattcatatggatgatgaattgcgacatattgcacaaaattctcttcagggtttacttgttgacttctcagattggagggaagatgtactatttggctttaccaacttcctgctccgggaagtaaatgatatgcatcacacactccttgattcgtccctgaagttgctgctgcagctgctcacccag

SEQ ID NO: 2200 - DNA, 481 bp, Artificial
  cDNA Sequence
caggtggccacacgcaaactgtccgttttaatactcaaggaaattcgagcgttgtttattgccctggggcagcctgaggatgacgacaggccgatgattgatgtcatggatcagctaagttcttccattctagaaagttttattcatgtagcagtttcggattcagcaacattaccactcacccacaatgtggatctgcagtggttggtggaatggaacgcagtcctggtcaatagccattatgatgtgaaaagcccttcccatgtctggatatttgcacagtctgtcaaagacccctgggtcctctgcctcttcagcttcctccggcaggagaacttacccaagcactgccccacagccctcagctatgcctggccttatgccttcactcggctccagtcggtgatgcctctggtggacccaaatagcccaattaatgccaagaaaaccagcactgccggcagcggagacaactatgtta

SEQ ID NO: 2201 - DNA, 717 bp, Artificial
  cDNA Sequence
gcgcgggcttgtggcgcgagcttctgaaactaggcggcagaggcggagccgctgtggcactgctgcgcctctgctgcgcctcgggtgtcttttgcggcggtgggtcgccgccgggagaagcgtgaggggacagatttgtgaccggcgcggtttttgtcagcttactccggccaaaaaagaactgcacctctggagcggacttatttaccaagcattggaggaatatcgtaggtaaaaatgcctattggatccaaagagaggccaacattttttgaaatttttaagacacgctgcaacaaagcagatttaggaccaataagtcttaattggtttgaagaactttcttcagaagctccaccctataattctgaacctgcagaagaatctgaacataaaaacaacaattacgaaccaaacctatttaaaactccacaaaggaaaccatcttataatcagctggcttcaactccaataatattcaaagagcaagggctgactctgccgctgtaccaatctcctgtaaaagaattagataaattcaaattagacttaggaaggaatgttcccaatagtagacataaaagtcttcgcacagtgaaaactaaaatggatcaagcagatgatgtttcctgtccacttctaaattcttgtcttagtgaaagtcctgttgttctacaatgtacacatgtaacaccacaaagagataagtcaggtatg

SEQ ID NO: 2202 - DNA, 813 bp, Artificial
  cDNA Sequence
gcggcagaggcggagccgctgtggcactgctgcgcctctgctgcgcctcgggtgtcttttgcggcggtgggtcgccgccgggagaagcgtgaggggacagatttgtgaccggcgcggtttttgtcagcttactccggccaaaaaagaactgcacctctggagcggacttatttaccaagcattggaggaatatcgtaggtaaaaatgcctattggatccaaagagaggccaacattttttgaaatttttaagacacgctgcaacaaagcagatttaggaccaataagtcttaattggtttgaagaactttcttcagaagctccaccctataattctgaacctgcagaagaatctgaacataaaaacaacaattacgaaccaaacctatttaaaactccacaaaggaaaccatcttataatcagctggcttcaactccaataatattcaaagagcaagggctgactctgccgctgtaccaatctcctgtaaaagaattagataaattcaaattagacttaggaaggaatgttcccaatagtagacataaaagtcttcgcacagtgaaaactaaaatggatcaagcagatgatgtttcctgtccacttctaaattcttgtcttagtgaaagtcctgttgttctacaatgtacacatgtaacaccacaaagagataagtcagtggtatgtgggagtttgtttcatacaccaaagtttgtgaagggtcgtcagacaccaaaacatatttctgaaagtctaggagctgaggtggatcctgatatgtcttggtcaagttctttagctacaccacccacc

SEQ ID NO: 2203 - DNA, 1130 bp, Artificial
  cDNA Sequence
tctgacataatttcattgagcgcaaatatatctgaaacttctagcaataaaactagtagtgcagatacccaaaaagtggccattattgaacttacagatgggtggtatgctgttaaggcccagttagatcctcccctcttagctgtcttaaagaatggcagactgacagttggtcagaagattattcttcatggagcagaactggtgggctctcctgatgcctgtacacctcttgaagccccagaatctcttatgttaaagatttctgctaacagtactcggcctgctcgctggtataccaaacttggattctttcctgaccctagaccttttcctctgcccttatcatcgcttttcagtgatggaggaaatgttggttgtgttgatgtaattattcaaagagcataccctatacagtggatggagaagacatcatctggattatacatatttcgcaatgaaagagaggaagaaaaggaagcagcaaaatatgtggaggcccaacaaaagagactagaagccttattcactaaaattcaggaggaatttgaagaacatgaagaaaacacaacaaaaccatatttaccatcacgtgcactaacaagacagcaagttcgtgctttgcaagatggtgcagagctttatgaagcagtgaagaatgcagcagacccagcttaccttgagggttatttcagtgaagagcagttaagagccttgaataatcacaggcaaatgttgaatgataagaaacaagctcagatccagttggaaattaggaaggccatggaatctgctgaacaaaaggaacaaggtttatcaagggatgtcacaaccgtgtggaagttgcgtattgtaagctattcaaaaaaagaaaaagattcagttatactgagtatttggcgtccatcatcagatttatattctctgttaacagaaggaaagagatacagaatttatcatcttgcaacttcaaaatctaaaagtaaatctgaaagagctaacatacagttagcagcgacaaaaaaaactcagtatcaacaactaccggtttcagatgaaattttatttcagatttaccagccacgggagccccttcacttcagcaaatttttagatccagactttcagcc

SEQ ID NO: 2204 - DNA, 569 bp, Artificial
  cDNA Sequence
gaaaacacaacaaaaccatatttaccatcacgtgcactaacaagacagcaagttcgtgctttgcaagatggtgcagagctttatgaagcagtgaagaatgcagcagacccagcttaccttgagggttatttcagtgaagagcagttaagagccttgaataatcacaggcaaatgttgaatgataagaaacaagctcagatccagttggaaattaggaaggccatggaatctgctgaacaaaaggaacaaggtttatcaagggatgtcacaaccgtgtggaagttgcgtattgtaagctattcaaaaaaagaaaaagattcagttatactgagtatttggcgtccatcatcagatttatattctctgttaacagaaggaaagagatacagaatttatcatcttgcaacttcaaaatctaaaagtaaatctgaaagagctaacatacagttagcagcgacaaaaaaaactcagtatcaacaactaccggtttcagatgaaattttatttcagatttaccagccacgggagccccttcacttcagcaaatttttagatccagactttcagcc

SEQ ID NO: 2205 - DNA, 1636 bp, Artificial
  cDNA Sequence
aaatcaaaaaagggttccttctgccaatcaatggtatgaacatggcacagtgctcaacacattcaaaattcctttccttgggtcatctcatttgattcccaattccagaaaaagtaagtatcatttattccattaacagagagcaaaacttgcccaaggtgaaaaagggaaataactgagtcaatacccaaattttctctttttctcacctccaactgaacttgaaaaactcaaattttctaacactgagtccaactttccttgaacagctgactcaaaagggtaggccaggacagttctcaagtagcatttgctttcatcactgccataattatacgtagtgttatctatttttaaagcccttagcagaatctaaatataaacatatgccaattctcctttcttctatcagaaaagatttttaaatagttacactgtcagatgctattctcaagtgtagcaaattaaagattttcttctactagaaacataaaagcacttgtcagtgattacaagtatcattatagttctaacatttttatttcattttttagagacagggtctcactatgttgcccaggctggtctcaaactcctgagctcaagtgactggtccaccctggcctcccaaagtgttgggattacatgcatgagtcactgcagccggcgacaaatatcatttataatttttaaataatgaattaccaagtattcagttggtatcctttacttaccgagacaatgttgttttcccagaaccaggcagacctcttaaaagaataagtaacttctgcaatttatttaacttttcctcttgaaactgctggttcacaaacctgtctgttccattatgcttgtccatacaatgatctttccagcatctttctctgacttcacagaaaccattactcacatatcgatcttgcatactgcagccatttccagagggatgaacactactcctattctcactacagtcagtatattcattgttctgatcaaaagtcatgcaattccagttaacatgacaattatttacataatatccattttgtatctgagagtcatcttgggcttggaaaatatttgatggtggatttggtggaccactgaatctctgaatgtttaaatgatagttcaaactgggaagagggggaccatagggcactataaaaggatatactgactgccattcaggcctgaaagaagtaaatgaagtgtcacaaaatgtaggtattacttgtccattacagggatatttgtctggctcattccccaagttttaagagaccattattatgaccctcataaaatggaacaaattgttcctgagaaggttcagattctttacaactgttctcaaaaccatctttttccttttcaagctcttcaatttctttgtaaaactggaataattcattgtcaatctctgatttttcagagttaaatttctgtttctctttttgtcctcctctgtcatttataccatttagaacatgtgcctcattcctcccttcattacgtttctttttctcagggggtttgtaaatgggtcctataaatgctttacttgtgctatatatctcatcgtctgcggatactaatggaggacgtgcttcctgtaaaacctgtgaat

SEQ ID NO: 2206 - DNA, 712 bp, Artificial
  cDNA Sequence
attttgaagcggagaggaggaggaacggcagggctggctgcggaaggggagggggggggagaaggcgattggatgcggcggcggcggcggatcccggagagccccggagtgagcggagtagcgagtcggcaacccggaggggtagaaatatttctgtcatggctcattcaaagactaggaccaatgatggaaaaattacatatccgcctggggtcaaggaaatatcagataaaatatctaaagaggagatggtgagacgattaaagatggttgtgaaaacttttatggatatggaccaggactctgaagaagaaaaggagctttatttaaacctagctttacatcttgcttcagatttttttctcaagcatcctgataaagatgttcgcttactggtagcctgctgccttgctgatattttcaggatttatgctcctgaagctccttacacatcccctgataaactaaaggcaagatatatttatgtttataacaagacagttgaaggggctagaggatacaaagagcccacaattcaataggtatttttatttacttgagaacattgcttgggtcaagtcatataacatatgctttgagttagaagatagcaatgaaattttcacccagctatacagaaccttattttcagttataaacaatggccacaatcagaaagtccatatgcacatggtagaccttatgagctcta

SEQ ID NO: 2207 - DNA, 606 bp, Artificial
  cDNA Sequence
gcggagtagcgagtcggcaacccggaggggtagaaatatttctgtcatggctcattcaaagactaggaccaatgatggaaaaattacatatccgcctggggtcaaggaaatatcagataaaatatctaaagaggagatggtgagacgattaaaggtgagtaaaattctattcttttttacatctgtgtagggcagaggtcccctgtggaaatcacatggggctataatgtatcttgttggggtaacttaaaaaagcaaagcaaagcagcaaatggcatagaaaagatctaagggagtagagtatataaggtacagtggggattatttggctatgattaaagggacagcaattaggtgaagcttagattttctaggatctcctatacttgggtataaagaacaagtctacaatactcatattccttattgtctatacaaagttgtctcctttcttctatatagtttctaaagacaaccactttaagggagttttaggtctttatactgagtaattaggctgtgtactactttcttgtaagttattttcaaagtaggtcaaagggcttcactttaagcttcttcctctgcttctgacatgtagtaatg

SEQ ID NO: 2208 - DNA, 772 bp, Artificial
  cDNA Sequence
atcttgcgtacggaggtgaggtttgttaccgcgattctgagaggtgggcttttagtccctccagacctcggctttagtgctgtctccgcttttctttcaccttcacagagatgtcttatggtgaaattgaaggtaaattcttgggacctagagaagaagtaacgagtgagccacgctgtaaaaaattgaagtcaaccacagagtcgtatgtttttcacaatcatagtaatgctgattttcacagaatccaagagaaaactggaaatgattgggtccctgtgaccatcattgatgtcagaggacatagttatttgcaggagaacaaaatcaaaactacagatttgcatagacctttgcatgatgagatgcctggtaatagaccagatgttattgaatccattgattcacaggttttacaggaagcacgtcctccattagtatccgcagacgatgagatatatagcacaagtaaagcatttataggacccatttacaaaccccctgagaaaaagaaacgtaatgaagggaggaatgaggcacatgttctaaatggtataaatgacagaggaggacaaaaagagaaacagaaatttaactctgaaaaatcagagattgacaatgaattattccagttttacaaagaaattgaagagcttgaaaaggaaaaagatggttttgagaacagttgtaaagaatctgaaccttctcaggaacaatttgttccattttatgagggtcataataatggtctcttaaaacctgatgaagaaaa

SEQ ID NO: 2209 - DNA, 1321 bp, Artificial
  cDNA Sequence
atttaaacattcagagattcagtggtccaccaaatccaccatcaaatattttccaagcccaagatgactctcagatacaaaatggatattatgtaaataattgtcatgttaactggaattgcatgacttttgatcagaacaatgaatatactgactgtagtgagaataggagtagtgttcatccctctggaaatggctgcagtatgcaagatcgatatgtgagtaatggtttctgtgaagtcagagaaagatgctggaaagatcattgtatggacaagcataatggaacagacaggtttgtgaaccagcagtttcaagaggaaaagttaaataaattgcagaagttacttattcttttaagaggtctgcctggttctgggaaaacaacattgtctcgaattctgcttggtcagaatcgtgatggcattgtgttcagcactgatgactattttcaccatcaagatgggtacaggtataatgttaatcaacttggtgatgcccatgactggaaccagaacagagcaaaacaagctatcgatcagggaagatctccagttataatagataacactaatatacaagcttgggaaatgaagccatatgtggaagtggccataggaaaaggatacagagtagagtttcatgaacctgaaacttggtggaaatttgatcctgaagaattagaaaagaggaataaacatggtgtgtctcgaaagaagattgctcagatgttggatcgttatgaatatcaaatgtccatttctattgtaatgaattcagtggaaccatcacacaaaagcacacaaagacctcctcctccacaggggagacagaggtggggaggctctcttggctcacataatcgtgtctgtgtcacaaataatcattaaattagctattttcagctaacacatttgttgttgcacttgaaaaagagttagtgagcctgtcttggagtttaagtagtttcaaataaaaaaaggctacagtgcctcacaaaggatgttcccagcaagttgtttaaattcccagcaagttgttaaagtgtaaataaaaatatatgaaattgtattttaaatgtttttatattctcttgttgtaatactcttggctgttatggaagcacctgagtaatagagtggtgggtaggagctaggatgtttttctacaatcgaattttaaactaatttatctattttatagacactattgaacagttttttaatagttcatatctaaatctaacttttcataaaactttacggtttttccttcactaccttaaatatgcaagaaatactgacttggtatagggtacctt

SEQ ID NO: 2210 - DNA, 945 bp, Artificial
  cDNA Sequence
taactggaattgcatgacttttgatcagaacaatgaatatactgactgtagtgagaataggagtagtgttcatccctctggaaatggctgcagtatgcaagatcgatatgtgagtaatggtttctgtgaagtcagagaaagatgctggaaagatcattgtatggacaagcataatggaacagacaggtttgtgaaccagcagtttcaagaggaaaagttaaataaattgcagaagttacttattcttttaagaggtctgcctggttctgggaaaacaacattgtctcgaattctgcttggtcagaatcgtgatggcattgtgttcagcactgatgactattttcaccatcaagatgggtacaggtataatgttaatcaacttggtgatgcccatgactggaaccagaacagaggtttgttttgggctaagtgtcccaggatagaatatttggctaggagtcaaaagacctagattttattttcagcttaggtttttaccagctgaatgactgtaggcaagccgtttaaatagctttgagacctaatttctccatctgttagaggtggtgataattatacttgccctacctgatcagggtttttgtgaaaagcagagaatttagataaaacgctttgtaaactgtaaatagtttatcagtataagctggtaaaataatagcagcatgggatattttaagaggctttattttatacttgatgagtaaattcagagaactttgaatctgtaccattgttatgtagtcccaaagttatttccccgagaataatgctaatgttttccaaggcttaatatactggttgtgaatattaaaagtttttctcattgatattgctctacaagaaacctacttaatacattttttagcggacatgggtcaatttctgtttatcattaataggggttcttaacctgggctacacttt

SEQ ID NO: 2211 - DNA, 801 bp, Artificial
  cDNA Sequence
agcaaaacaagctatcgatcagggaagatctccagttataatagataacactaatatacaagcttgggaaatgaagccatatgtggaagtggccataggaaaaggatacagagtagagtttcatgaacctgaaacttggtggaaatttgatcctgaagaattagaaaagaggaataaacatggtgtgtctcgaaagaagattgctcagatgttggatcgttatgaatatcaaatgtccatttctattgtaatgaattcagtggaaccatcacacaaaagcacacaaagacctcctcctccacaggggagacagaggtggggaggctctcttggctcacataatcgtgtctgtgtcacaaataatcattaaattagctattttcagctaacacatttgttgttgcacttgaaaaagagttagtgagcctgtcttggagtttaagtagtttcaaataaaaaaaggctacagtgcctcacaaaggatgttcccagcaagttgtttaaattcccagcaagttgttaaagtgtaaataaaaatatatgaaattgtattttaaatgtttttatattctcttgttgtaatactcttggctgttatggaagcacctgagtaatagagtggtgggtaggagctaggatgtttttctacaatcgaattttaaactaatttatctattttatagacactattgaacagttttttaatagttcatatctaaatctaacttttcataaaactttacggtttttccttcactaccttaaatatgcaagaaatactgacttggtatagggtacctt

SEQ ID NO: 2212 - DNA, 718 bp, Artificial
  cDNA Sequence
tagtaatcaaaatttatccggttaaatagtcttaactgttataaaccatattattttataaagcgtcatttttcttggtcgagcaagtgtatagtattgtcgaaatgaaatttaactgtctgccttctttttactttaagaagtacttctctgggtttttgttttcttcctttcctttgtgtaggccataggaaaaggatacagagtagagtttcatgaacctgaaacttggtggaaatttgatcctgaagaattagaaaagaggaataaacatggtgtgtctcgaaagaagattgctcagatgttggatcgttatgaatatcaaatgtccatttctattgtaatgaattcagtggaaccatcacacaaaagcacacaaagacctcctcctccacaggggagacagaggtggggaggctctcttggctcacataatcgtgtctgtgtcacaaataatcattaaattagctattttcagctaacacatttgttgttgcacttgaaaaagagttagtgagcctgtcttggagtttaagtagtttcaaataaaaaaaggctacagtgcctcacaaaggatgttcccagcaagttgtttaaattcccagcaagttgttaaagtgtaaataaaaatatatgaaattgtattttaaatgtttttatattctcttgttgtaatactcttggctgttatggaagcacctgagtaatagagtggtgg

SEQ ID NO: 2213 - DNA, 505 bp, Artificial
  cDNA Sequence
agttttggcctgggtaaccgagaggtgaccgccatcttgcgtacggagatgtcttatggtgaaattgaaggtaaattcttgggacctagagaagaagtaacgagtgagccacgctgtaaaaaattgaagtcaaccacagagtcgtatgtttttcacaatcatagtaatgctgattttcacagaatccaagagaaaactggaaatgattgggtccctgtgaccatcattgatgtcagaggacatagttatttgcaggagaacaaaatcaaaactacagatttgcatagacctttgcatgatgagatgcctggtaatagaccagatgttattgaatccattgattcacaggttttacaggaagcacgtcctccattagtatccgcagacgatgagatatatagcacaagtaaagcatttataggacccatttacaaaccccctgagaaaaagaaacgtaatgaagggaggaatgaggcacatgttctaaatggtataaatgacagag

SEQ ID NO: 2214 - DNA, 702 bp, Artificial
  cDNA Sequence
gaccgccatcttgcgtacggagatgtcttatggtgaaattgaagaattctgcttggtcagaatcgtgatggcattgtgttcagcactgatgactattttcaccatcaagatgggtacagcaaaacaagctatcgatcagggaagatctccagttataatagataacactaatatacaagcttgggaaatgaagccatatgtggaagtggccataggaaaaggatacagagtagagtttcatgaacctgaaacttggtggaaatttgatcctgaagaattagaaaagaggaataaacatggtgtgtctcgaaagaagattgctcagatgttggatcgttatgaatatcaaatgtccatttctattgtaatgaattcagtggaaccatcacacaaaagcacacaaagacctcctcctccacaggggagacagagagaaagagttttgaagaaaactgggcataggctcagcaaaaccaaacagaagaggaacagaaaaagaaacaaaaagcagaacagtcagaatagaatcatggaggaaaactcattagaattcttaagtgatcttacaccgggagatcaggacccatctcagagtgaagaggaagacattgaaaagaccagaagagaatcagaatatcccttcattgatggtctacaaaatgaagtcggagattttgtgactggatataaagaaaaaagatg

SEQ ID NO: 2215 - DNA, 975 bp, Artificial
  cDNA Sequence
gccatcttgcgtacggaggtgaggtttgttaccgcgattctgagaggtgggcttttagtccctccagacctcggctttagtgctgtctccgcttttctttcaccttcacagaggttcgtgtcttcctaaaagaaggttttattgggaggtaaaggtcaatgcgtaggggtagagtaagatgtcttatggtgaaattgaaggtaaattcttgggacctagagaagaagtaacgagtgagccacgctgtaaaaaattgaagtcaaccacagagtcgtatgtttttcacaatcatagtaatgctgattttcacagaatccaagagaaaactggaaatgattgggtccctgtgaccatcattgatgtcagaggacatagttatttgcaggagaacaaaatcaaaactacagatttgcatagacctttgcatgatgagatgcctggtaatagaccagatgttattgaatccattgattcacaggttttacaggaagcacgtcctccattagtatccgcagacgatgagatatatagcacaagtaaagcatttataggacccatttacaaaccccctgagaaaaagaaacgtaatgaagggaggaatgaggcacatgttctaaatggtataaatgacagaggaggacaaaaagagaaacagaaatttaactctgaaaaatcagagattgacaatgaattattccagttttacaaagaaattgaagagcttgaaaaggaaaaagatggttttgagaacagttgtaaagaatctgaaccttctcaggaacaatttgttccattttatgagggtcataataatggtctcttaaaacctgatgaagaaaagaaagatcttagtaataaagctatgccatcacattgtgattatcagcagaacttggggaatgagccagacaaatatccctgtaatggacaagtaatacctacattttgtgacacttcatttacttctttcaggcc

SEQ ID NO: 2216 - DNA, 1076 bp, Artificial
  cDNA Sequence
aaagctacccctttaaatattgatggacagcgttattctcattgcctgtcatttaacagactaaggtgctctgcatctttatacaaaaattatattccttcttttgtgctacataatttatctagtatttggaagccatcttttacaaacaagaaactgtttttgactttcgaatctcagacaagagtaggtaataaactaaatgatgcagggtttatttctccagaaattttacatagtcatcctgatacttcgtgctctttgggagtcacttctgattttcactttttaaatgaaaggtttgatagaaagctgaaaagatgggaagaacctaaggaattaccagctgaggacagccaagacttaacaagcactgactaccgttcccttgagctaccattatcacaagggtttgcctttcaattagtaaagctttttggatctccaggcgttccaatggaatccttgttgcctgatgactatgtggttccccttgactggaagacactaaagatgatctacttgcaatggaagatgtcagtggagaaaagacagaagaagattggttgaaaaatgaaaattccttgaactttgagttctgctgtcttcatggtactgctgaagatcatgatcacggagaaaagtcagagtgctcagtgccaacccaagggattctttccagagacgtacccgttggataccaaaattagtttggataatctgttcaaccattcttgataagttatctgaataataaaaaaactcaacagaggaggtaacaatttgaacattttattgtctaatttgaagatgtatgccatactttgtttgatagaagaaagtaaggcacagaaaacttgagtaccttatttttaaaactgcattaggattaaaaggttagcccctatatccaagtattggtctgagatcccatttctagaattctgaaatccaaaaagctctgaaaatcaatagttatttttccaaatgtattcattgtggtaaaatacaccaatataaaatttaccatcttaaccacttttaagtgtgttataaatacattcatgctaccatca

SEQ ID NO: 2217 - DNA, 1211 bp, Artificial
  cDNA Sequence
taaagggaacccggggctctcgcagccagccctcctgcccatggaggacagtttccttcaatcttttgggaggctgagcctccagccccagcagcagcagcagcggcagcggccgccccggccgcccccgcgggggacacctcctcgccgccacagctttaggaaacacctctacctcctgcgaggcctcccgggctccgggaaaactacactggccaggtaatgacagcgcatgactttcccagggccctgattttcagcacggatgattttttcttcagggaagatggtgcctatgagttcaatcctgacttcctggaggaagctcatgaatggaaccaaaaaagagcaagaaaagcaatgaggaatggcatatcccccattattattgataataccaacctccacgcctgggaaatgaagccctatgcagtcatggtatttcagaccgaacaaaagaatcttttcaggctggaaatggacatggtagttttcaggccagaaatgaagaaacattcatggtgtctcaagagaaaaaatccaccgaatgaaagaacggtatgaacacgatgttacttttcacagtgtgcttcatgcagaaaagccaagcagaatgaacagaaaccaggacaggaataatgcattgccttccaacaatgccagatactggaattcctacacagagtttccaaaccggagggcccacggtggatttacaaatgagagctcctatcacagaaggggcggttgtcaccatggatattagaggcctatcttacagccaggcagaattttcctaagtcagtttctacttcagtttttgttattttttgttgcattttagtcagagctccaattccagtgtaaatagctgaactcaaaagtttctgagcaaagtcattatattcactttcttcaccaaaatttgttaaagtgcttctatatgcatggtctgatgctgggaattctgcagatttgagtaaacagtctctttctctagggtaagaatttgaaaccaaaacttgagaacacacccaagaatatatttacataggttcatagatgaaataaagtgtttatattatatataagcttcagtaccatttgctctgaagtgatctatttattttttcaggaaattcatctccatcggtaaagttgggaaggtggagagaagtggtgggggggcattgctacttatcaaagtgcca

SEQ ID NO: 2218 - DNA, 562 bp, Artificial
  cDNA Sequence
gcggccgccccggccgcccccgcgggggacacctcctcgccgccacagctttaggaaacacctctacctcctgcgaggcctcccgggctccgggaaaactacactggccagggacgactggagtgagcactggcctgggagtctgaagattgtgccttcagacctacttcgtcacttactagctggcgactttggtcagtcatctagtttttccgggccttatgttccttacatgtgactactaaaaggctactagattataggatttattaaagatccttctgactcttaatttccagtggtcagattaaaaatagtttgctaataatggctatgttaaagagctctgaccttggagtcaatttatggctccacatccaagctctaccattcactagttttgcttttcacccaacccctctgtgcctcggtttccttttctgttaaatggggatatctgttctgtttgcctctgagggttttgtgaacattaaatgtgtgtgggaggactttttaaacttaaagtgctatatacattttaagaggtgttagttactgctcc

SEQ ID NO: 2219 - DNA, 662 bp, Artificial
  cDNA Sequence
ctccactttccagacaattgcagcatgactttcccagggccctgattttcagcacggatgattttttcttcagggaagatggtgcctatgagttcaatcctgacttcctggaggaagctcatgaatggaaccaaaaaagagcaagaaaagcaatgaggaatggcatatcccccattattattgataataccaacctccacgcctgggaaatgaagccctatgcagtcatggcacttgaaaataactatgaagttatattccgagaacctgacactcgctggaaattcaacgttcaagagttagcaagaagaaacattcatggtgtctcaagagaaaaaatccaccgaatgaaagaacggtatgaacacgatgttacttttcacagtgtgcttcatgcagaaaagccaagcagaatgaacagaaaccaggacaggaataatgcattgccttccaacaatgccagatactggaattcctacacagagtttccaaaccggagggcccacggtggatttacaaatgagagctcctatcacagaaggggcggttgtcaccatggatattagaggcctatcttacagccaggcagaattttcctaagtcagtttctacttcagtttttgttattttttgttgcattttagtcagagctccaattccag

SEQ ID NO: 2220 - DNA, 228 bp, Artificial
  cDNA Sequence
ccaaggaacccaattgcttgatctggcttcaagcctgggcaacgtggcgagatcccctctccacaaaaatacaaaaattagccaggcgatgtgggaggcatctctactcccaactactcaggaggctgaggcgggaggatcgctggagcctgggaggctggacgaggggagagaggggtatcctggggagtccccgtcttctcaaagcgcgtttgtttttccagatcc

SEQ ID NO: 2221 - DNA, 967 bp, Artificial
  cDNA Sequence
ggtggcacgggctgtgcagtgttaaacggtgacgatgcctggggagcctgtggacgtggcatgtggcgtggaccacatggtgaccctggccaagtcattcatctaaacctccctcacctgcttgggcggccccgtcccgggaaccactggcactccttggcagaggccagcgcgtggccagccccccggggttcttggatggtggtggcggaggaccctgcgtgcagtgtgacgctctgtcctgaatcccttagcgggtacctaccaggaggatcagggcaaggtccctctccagctgcaggtgaggcctgcggaactcagcttggatggcagcctttggtgggccgctgtggcccgcacgtctctgttctctccaagtaacatgcgacggtgtctggtgtcacgtctcgcctgagaagcccgtcttaggaaagcttagcttgaacacagtgctcgggaggtttctgctctgtctgtcatggcagtctcttggtttgtgtctggccaaggccatgcgtgtgcctcggaccgagccccagcttaggcgagggagtcaggctggcttcggccctcggttttcattcaggccaccctgctcatggcccttcctggccgcctgccacaccgcaagctcgctggggggacactagaagcaccgtggcctgggattccatctggagctgtccgcaggcaccagccccagcctcccaccacgctcactgcctggcttggaaaagttaagaagcccctcaggaagagaatcgaggccaagttcctctgcgccgagggccccgagcatatccgccaaggctcagctgcagtgccaggcggaggaggaagatccagaaattgtgaacaatgtttgatttagtagcgtgacttgcctttccctttaaaaacatcttttacaaatctgtcttggaataaagtctattttctgccttttggtttttaagctctgaagaga

SEQ ID NO: 2222 - DNA, 1090 bp, Artificial
  cDNA Sequence
gcttgggctgtcctctgatgccatgttgtcagcccagacaggcagtgtgatcagggctcctggcaagggtctttgagacacagccactgcccctgcttggtggtcgtgacttgggacgcagcctgcctgtgactggagctgggggtgacgggtgacgatgcctggggagcctgtggacgtggcatgtggcgtggaccacatggtgaccctggccaagtcattcatctaaacctccctcacctgcttgggcggccccgtcccgggaaccactggcactccttggcagaggccagcgcgtggccagccccccggggttcttggatggtggtggcggaggaccctgcgtgcagtgtgacgctctgtcctgaatcccttagcgggtacctaccaggaggatcagggcaaggtccctctccagctgcaggtgaggcctgcggaactcagcttggatggcagcctttggtgggccgctgtggcccgcacgtctctgttctctccaagtaacatgcgacggtgtctggtgtcacgtctcgcctgagaagcccgtcttaggaaagcttagcttgaacacagtgctcgggaggtttctgctctgtctgtcatggcagtctcttggtttgtgtctggccaaggccatgcgtgtgcctcggaccgagccccagcttaggcgagggagtcaggctggcttcggccctcggttttcattcaggccaccctgctcatggcccttcctggccgcctgccacaccgcaagctcgctggggggacactagaagcaccgtggcctgggattccatctggagctgtccgcaggcaccagccccagcctcccaccacgctcactgcctggcttggaaaagttaagaagcccctcaggaagagaatcgaggccaagttcctctgcgccgagggccccgagcatatccgccaaggctcagctgcagtgccaggcggaggaggaagatccagaaattgtgaacaatgtttgatttagtagcgtgacttgcctttccctttaaaaacatcttttacaaatctgtcttggaataaagtctattttctgccttttggtttttaagctctgaagaga

SEQ ID NO: 2223 - DNA, 1690 bp, Artificial
  cDNA Sequence
cttcagcatgggaaacaattcttatgggcaatgtggaagaaaggtggtcgaaaatgaaatttacagtgaaagtcacagagtccacaggatgcaggacttcgatggccaggtggtccaggtcgcctgtggtcaggatcatagtctgttcctgacggataaaggagaagtctattcttgtggatggggtgctgatgggcaaacaggtctgggtcactacaatatcaccagctcgcccaccaagctgggtggagacctggcgggagtgaacgttatccaagttgccacctacggtgattgctgcctggccgtgtccgccgacggaggactttttggttggggaaactcggagtacctgcagctggcctctgtcactgactccacacaggtgaatgtgccccgctgcttacacttctcaggagtggggaaggtgcgacaggctgcatgcggtggcacgggctgtgcagtgttaaacggagaaggacatgtttttgtctggggctatggaattcttgggaaaggtccaaacctagtggaaagtgccgtccctgaaatgattccacccactctctttggcttgacggagttcaacccagaaatccaggtttcccgcatccgatgtggactcagccgctttgctgcactgaccaacaaaggagagctgtttgtatggggcaagaacatccgagggtgcctgggaatcggtcgcctggaggaccagtatttcccatggagggtaaggctggccggggaggtgacgatgcctggggagcctgtggacgtggcatgtggcgtggaccacatggtgaccctggccaagtcattcatctaaacctccctcacctgcttgggcggccccgtcccgggaaccactggcactccttggcagaggccagcgcgtggccagccccccggggttcttggatggtggtggcggaggaccctgcgtgcagtgtgacgctctgtcctgaatcccttagcgggtacctaccaggaggatcagggcaaggtccctctccagctgcaggtgaggcctgcggaactcagcttggatggcagcctttggtgggccgctgtggcccgcacgtctctgttctctccaagtaacatgcgacggtgtctggtgtcacgtctcgcctgagaagcccgtcttaggaaagcttagcttgaacacagtgctcgggaggtttctgctctgtctgtcatggcagtctcttggtttgtgtctggccaaggccatgcgtgtgcctcggaccgagccccagcttaggcgagggagtcaggctggcttcggccctcggttttcattcaggccaccctgctcatggcccttcctggccgcctgccacaccgcaagctcgctggggggacactagaagcaccgtggcctgggattccatctggagctgtccgcaggcaccagccccagcctcccaccacgctcactgcctggcttggaaaagttaagaagcccctcaggaagagaatcgaggccaagttcctctgcgccgagggccccgagcatatccgccaaggctcagctgcagtgccaggcggaggaggaagatccagaaattgtgaacaatgtttgatttagtagcgtgacttgcctttccctttaaaaacatcttttacaaatctgtcttggaataaagtctattttctgccttttggtttttaagctctgaagaga

SEQ ID NO: 2224 - DNA, 684 bp, Artificial
  cDNA Sequence
tttcattttaattaacactttacaaagtacaaaatatactgtcttttttgggggaacattaggtaattttttttctccaacatacagtacatgaatctcgagggttttgtgtttcttcaacaagaaaataagcttgagggccccgggggggataacggaaatgattttggcatagagaaagaggagggcttgggactgttatcagctccctactcttttagagggaactctgctcaactcttcctagactgtcttctgaatacaggtaaactgaggcagtggaagggaaaccgcactggccttggcctgtcttgggacctgaacttggcctgctgttcaccctgccacctccaaagtttgggtgaggggcaggggtctccaattcttctggaccttcttccagaatgagccccagtagatgagggagtgccggcccccacaaactctccctgtgaacaccatctgcaggatgggatgcctttgaagagtcagcacgggcagccccagccccttccaatcagagctgggctgtatcaaaccagagcatggtggaggcaacggcgtgtgaattctgaggctagggataaaaataacacgttggcttttaccctgggcccttgaatctcttgctctggggggaagccgagcgccatattgtgaagacactcaagcagccctgtgggt

SEQ ID NO: 2225 - DNA, 1709 bp, Artificial
  cDNA Sequence
ctggaaaatgtggccaggaggagggggccagtgggaggtggcctgtgttcacctttgaagatcaccaaatagtgccctgggctttaacaggggcctggcccttcctgtcttcccagtcttctctcctgacctccagggcatcctctgtcacctcagaggggcaagcccctccagaccaagcctcctcctgctgaacaaatgtcaccctggctacgctgctgcttccggaggccacactggaagcctctgatcccccagctccttcctttcccaccagcagcctggtgcctggaggcacctgccccatccgccagcgccaagacaacaggcccactcctctgattacctccgggggatggacggcaaacaggtaaggagttccatgcaactgcggatggagcccctctgagaaacacatgcccctccaagtggggtctggggcctggagagaccctcccacccagcagaccaggagatagctgggggacaagggcagacggcccctgcctgggaaaaaccacactcacaccccaccccgaagagctgtggagaccaaaccaagactacgctacacacagaacgccgagaagataaaccaagctttacacgagcaggatggggatgggaaaactaaaggggccccctgtgaccgaggagcagggtccccagggggcagctcccacggagcgggcttgaacagggaccacccctgcagagccagccagggcggagagccataccctggccccagcgcgccccgacacacatgcttttctccatgacacgaggccagtccccaggagcagccccaggagcacaacctgagatttctaagcttgcaggttacaaaaaacaaaaaaaacagagaagctgcctgcgtaaaaagtgccacccacggaggcaggacacaggcagcgtgtggcccattcagcaggcccaggtcttcagggtgaggctgctggcgagggcaggggagagggggcattctggttaaaagcaagaaattccaaatactcctccctcgggatcaacatccccccaaataagggcgcccagggatcttgcctggggaaagtggggtgcagaaggcatgacccacgccacagcgggctctcagcacccttcccacgtcccatgtcacaggctctttgagctgctggctttgttctctcaagtcaggtctgagggaacccatcggcttctgtaataatcgtattgcctatatacttgaattaaaaatatatggtggctcaaatgtgcccgcgtgtatggcagacggtgcggggtggaggccgtcacgcccatacacgtgtgcacacacagcggggggctgtgtccacggactgcgcacacagtatatattaacatatatattgctcaagtatatatgctatttacagtatatatctctatcaacataaaacacaggtatttataggtgtgtacaatagatacgtcctaggaagtctaggggacacacgactctggggtcacggggccgacacacttgcacggcgggaaggaaaggcagagaagtgacaccgtcagggggaaatgacagaaaggaaaatcaaggccttgcaaggtcagaaaggggactcagggcttccaccacagccctgccccacttggccacctcccttttgggaccagcaatgtacgagttttgttctggagttttgtgcaaaacaaattaacttaaaaaaaaa

SEQ ID NO: 2226 - DNA, 228 bp, Artificial; identical to SEQ ID NO: 2220
  cDNA Sequence

SEQ ID NO: 2227 - DNA, 228 bp, Artificial; identical to SEQ ID NO: 2220
  cDNA Sequence

SEQ ID NO: 2228 - DNA, 228 bp, Artificial
  cDNA Sequence
ccaaggaacccaattgcttgatctggcttcaagcctgggcaacgtggcgagatcccctctccacaaaaatacaaaaattagccaggcgatgtgggaggcatctctactcccaactactcaggaggctgaggcgggaggatcgctggagcctgggaggctggatgaggggagagaggggtatcctggcgagtccccgtcttctcaaagcgcgtttgtttttccagatcc

SEQ ID NO: 2229 - DNA, 488 bp, Artificial
  cDNA Sequence
tttttccgaacgcccgcagcagggtcagaagggaggtggtcgccctccgtcgtggtctggcgtgtattccgagccttggtgtctggcggtttccgagcgttggtgtctggcggtttccgagcgttggtgtctggcggtttccgaccgttggtgtctggcggtttccgaccgttggtgtctggcacgcgccaccctctcttgctttggttgcgccatgccgatgtaccaggtaaagccctatcaccgggtctgcgcccctctccgtgtggagcccacctgcatgtactggctccccaacatgcacggcaggagcggcggcccagcacttggcactggccacttgcagacaagaagacaagaaaatgatttgaggacagcttcaatcgcggtgtgaagaagaaagcagcaaaacgaccactgaaaacaacgccggtggcaaaatatccaaagaaagggtcccaagcggtacatcgtcatagccggaaaca

SEQ ID NO: 2230 - DNA, 1050 bp, Artificial
  cDNA Sequence
gcgttggtgtctggcggtttccgagcgttggtgtctggcggtttccgaccgttggtgtctggcggtttccgaccgttggtgtctggcacgcgccaccctctcttgctttggttgcgccatgccgatgtaccagacaagaagacaagaaaatgatttgaggacagcttcaatcgcggtgtgaagaagaaagcagcaaaacgaccactgaaaacaacgccggtggcaaaatatccaaagaaagggtcccaagcggtacatcgtcatagccggaaacagtcagagccaccagccaatgatcttttcaatgctgcgaaagctgccaaaagtgacatgcagggatgtccttcctgagatccgtgctatctgcattgaggaaattgggtgttggatgcaaagctacagcacgtctttcctcaccgacagctatttaaaatatattggttggactctgcatgataagcaccgagaagtccgcgtgaagtgcgtgaaggctctgaaagggctgtacggtaaccgggacctgaccgcacgcctggagctcttcactggccgcttcaaggactggatggtttccatgatcgtggacagagagtacagtgtggcagtggaggccgtcagattactgatacttatccttaagaacatggaaggggtgctgatggacgtggactgtgagagcgtctaccccattgtgtaggcctctaattgaggcctggcctctgctgtgggtgaatttctgtactggaaacttttctaccctgagtgcgagataagaacgatgggtggaagagagcaacgccagagcccaggtgcccagaggactttcttccagcttctgctgtccttctttgtggagagcaaggtgacatacacagagataactctggctgttgtgcataggacctacaagtgggctggggttggtggttcacgcctgtaagcccaacactttgggaggctgaggtgggaggatcctttgagcccaggagtttgagaccagcttgggcaacatagtgagaccctgtctctaccaaaaaaaaaaaaaaaaaa

SEQ ID NO: 2231 - DNA, 733 bp, Artificial
  cDNA Sequence
gatgggtggaagagagcaacgccagagcccaggtgcccagaggactttcttccagcttctgctgtccttctttgtggagagcaagagtgcgatgacatggatcctgcggacaaaccgccccagggcgtacctagcaccgaagcatcaggcgccactaggtctccagctccttctcggatgacgtccttcagcacgccccggtcccccgagatgtccagcatcctctgacttaaccgctcgtacagggactgatggagaatgaaagccaggcctcagagccgcagacccacccggccacccctcagcgtctacgcccccgaaacgtctgggccctcacctggccgggggcgtcgtccccttccaggactccctggtttaacgcgcttccccccatgtcctagctgccctccctgtggcgtgagccttcggcctggtgcgccccgctgcccttcctggctgtgactctggtggggttccgaaggcccctttatgcccggcagacccctaccgacggcggcattacattctggggccacgaggaggcactcatcgtttcgttccaaccgccgccaacggccctggccctcgcgagctctggaactacagaggtcgcacgcccgggcagtgagtgtggatggcttggcaggtgagcctgctggagctggaggaccggcttcagtgtcccatctgcctggaggtcttcaaggagtccctaatgctacagtgcggccac

SEQ ID NO: 2232 - DNA, 1054 bp, Artificial
  cDNA Sequence
gatgggtggaagagagcaacgccagagcccaggtgcccagaggactttcttccagcttctgctgtccttctttgtggagagcaagagtgcgatgacatggatcctgcggacaaaccgccccagggcgtacctagcaccgaagcatcaggcgccactaggtctccagctccttctcggatgacgtccttcagcacgccccggtcccccgagatgtccagcatcctctgacttaaccgctcgtacagggactgatggagaatgaaagccaggcctcagagccgcagacccacccggccacccctcagcgtctacgcccccgaaacgtctgggccctcacctggccgggggcgtcgtccccttccaggactccctggtttaacgcgcttccccccatgtcctagctgccctccctgtggcgtgagccttcggcctggtgcgccccgctgcccttcctggctgtgactctggtggggttccgaaggcccctttatgcccggcagacccctaccgacggcggcattacattctggggccacgaggaggcactcatcgtttcgttccaaccgccgccaacggccctggccctcgcgagctctggaactacagaggtcgcacggtgagttgccaggtgtggcccgtaatcggagcgcacaaaacatgatgggacacgtaacgggaccacacagggcacattgggcacttgcaggggcgcgaggtggcggcacgtaatgggagcgcgctgagcatgatggggcatgtgcgggagcgccaggcggggcatgtaaccagagcgtgcggggcatgatggggcacggacatggggggttaggtggggcacgtaattggagctcgcggggcaggatggggcatctaactggagcgacagagagcacgatggggcacttacaggggccggaggctgggtacgtaatgagagcgagcgggaaatgatggggcacctaacgagcacgcagagcatgatggggcacgggtgcgaggtggggcgcacagtgggagcgcgtggggcatgatgggacacatggcgaggccgtca

SEQ ID NO: 2233 - DNA, 742 bp, Artificial
  cDNA Sequence
ggtgtgagccaccgtgcccggccttgactaccatattttaaatttactggaggacttttttgttctcttcttttttctttttttaatagcatcccgctcttatttcagaataaaaaaaattttaaggtatgttgagtaagaatctatagagcaatgaaaatgcaagagcaatagctatgggcaccaaatggtcaatcttcttatcataatgttgagtggaagaagccaggtccaccagacacatgctgctcatttatgcaaagtttggacacaggcaaaacaaaactagtttgatcgtgatgggaaacattagagaaatgcaaagacatgaccatcataattgtcaggagaaggcattggttaggattgggaagcggcaagcagaagcatttagggattggctggcaatgttttacttctcggctgagtgagggttgcatcggtgtttatttgataacacgttctaggggctgggcaagatggctcatgtttgtagtctcagtactttgggaggccaaagatgggaggattgcttgagcccgtgagtttgagaccagcgtgggtgacatagcgagaccctgtctctacaaaaaattaaaaaaaaaaaaaaaaacccagctgctttgaggctgcagtgagctatgaatgagccactgcactccagcctgggcaacagggcaagaccctgtctcaaaaaaaaaaaatttaatttgaacacttctgttttgtgcagttttctctg

SEQ ID NO: 2234 - DNA, 307 bp, Artificial
  cDNA Sequence
cagctccttgcccaacgtctccctggcctgggtgatcgaagccctgaggctccctggggacccagagcccaaggtctgcgtgcaccaccggaacccgctcagccttttctgcgagaaggaccaggagctcatctgtggcctctgcggtctgctgggctcccaccaacaccacccggtcacgcccgtctccaccgtctgcagccgcatgaaggaggagctcgcagccctcttctctgagctgaagcaggagcagaagaaggtggatgagctcatcgccaaactggtgaaaaaccggacccgaatcgtc

SEQ ID NO: 2235 - DNA, 1155 bp, Artificial
  cDNA Sequence
cgtaaaggcgcgcgggaacatggggctgtacgctgcggtggcaggcgtgctggccggcgtggagagccgccagggctctatcaaggggctggtgtactccagcaacttccagaacgtgaagcagctgtacgcgctggtgtgcgaaacgcagcgctactccgccgtgctggatgccgtgatctccagcgccggcctcctcagtgcgaagaagctgcagccgcacctggccaagggtaggggcggggcggggaagtgaaccccgacggtcagcgctttgtcatctggtttcagccccgctgccgtgcacggcgggactggagcaagtcgctcacctgaaatgagtatgagcagaccttccctgggttacgaattgagatgggatgaaaatgctttaacttcgagtgttttgaaggattaaataaccgaagtacaaagtagtagtagcggagacagtaaggaagtcgggcgtggcggcgcgcacctgtggtcccagctactcggaaggctgaggggggaggatcacttgagcccaggagttcgaagctgcagtgagctgttatgtggccactgcacttcagcctgggcgacagatctagaccccattctaaaaaaaaacaaaaaccccaaacccacacccacgaaagggtaatgttggcaagaagttgggtgcagaggtctactggtgaacatctgtggggaaagggtctaaggctgggaagcgagacgccaggttccgatcctgttgtgtagttaatttctggtgtggtcttgagtaaggtaccccacctttatctgtaaccatctagtcaggtgatctctttagccattccagtgcccgggctctattagagttagttctaaggcattcatacttcttgcttagggcgtttctgtctttgatccctcatccccaggtgctagtgtatgagttgttgggaaagggctttcgagggggtgggggccaatggaaggctctgttgggacggcaccaggcgaggtgttgagttggctcggctcaaggttcttcggggtgtgagctggcatgaggacctgttggaagtgggatccaggcctggtccagcctcccagctgcctcgatttgtgcgtgtgaacactctcaagacctgctccgtttatgtagttatttcaagagac

SEQ ID NO: 2236 - DNA, 335 bp, Artificial
  cDNA Sequence
ggggctgtacgctgcggtggcaggcgtgctggccggcgtggagagccgccagggctctatcaaggggctggtgtactccagcaacttccagccttgatgacttacaagccctcaaggggaagcattttctcctggactccttgatgccggagctgctggtgtttcccgcccagacagatctgcatgaacacccactgtaccgggccggacacctcattctgcaggacagggccagctgtctcccagccatgctgctggacccccgccaggctcccatgtcatcgatgcctgtgccgccccaggcaataagaccagtcacttggctgctcttctga

SEQ ID NO: 2237 - DNA, 601 bp, Artificial
  cDNA Sequence
gccgtgctggatgccgtgatctccagcgccggcctcctcagtgcgaagaagctgcagccgcacctggccaaggccttgatgacttacaagccctcaaggggaagcattttctcctggactccttgatgccggagctgctggtgtttcccgcccagacagatctgcatgaacacccactgtaccgggccggacacctcattctgcaggacagggccagctgtctcccagccatgctgctggacccccgccaggctcccatgtcatcgatgcctgtgccgccccaggcaataagaccagtcacttggctgctcttctgaagaaccaagggaagatctttgcctttgacctggatgccaagcggctggcatccatggccacgctgctggcctgggttggcgtctcctgctgtgagctggctgaggaggacttcctggcggtctcccccttagatccgcgctatcgtgaggtccactatgtcctgctggatccttcctgcagtggctcgggtatgccgagcagacagctggaggatcccggggcagggacacctagcccgcggctcgtctactccatgtgctccctctgccaggaggagaatgaa

SEQ ID NO: 2238 - DNA, 2050 bp, Artificial
  cDNA Sequence
attaacaaggcatgtcctgcacagccctagatcctttaaaccttgattccatacaacacatgtttttgtgagctcaaatttggggcaaagtcacaaattaacagcatctcagccaaccaattgttcaaggtacaggtcaaaatggaatttcttatgtcttccctttctacacagacacagtaacagtctgatctctctttcttttccctacaggattgcaggcatgcagcaccatgcctggctaattttgtatttttagtagagacgggatttctccatgttggccaggctggtctcaaactcctgacctcaggtgatctgcccaccttggcctcccaaaatgctgggattacaggcatgaaccaccgcgcccggccatgctaagtcctttcttggctccattgtgctgtccctcctgcttcctctccaggtccatctgccacagtgctacgtgcaccagcgtgccagcaacagtggctggtctctgccccgtgcctcctccactgggctcacacctgtcttattttgtcctttggtggctctgagaagcagcctctgcccctctccctttcccttactctttgtaagatcctcttccttctgccctaccatgttgcttggacaccagggtggaatagcagagaacggctgcttgtgtttgaattccagctctgccacttcgatagatttctgaactgagacatgtgactctctaggcctatttctgcatgggtcggagagtgggcgggactgctttactgagttatagtgaatgtagttttaacctaagcgcctcacatgactaactcctcatccatcaagaatgagctcagctctcacttccccactcctcacccccctgtaaagtaacctttctccaaggttatgcttcaacaggaatagctaacatttattaaattgtggcacgtaagtatcttggatatattggctcattgaatcctcacacctactattttacagagatgccagtggggcttgagattgaatcacttgcccaggctcccactgctggtaaacagtagagggggctcctgacccatcagtctggcttgacaacccattccctcaactgcggatcccggattcccttatcaccctgttgatttctccatagctgtggtaacatttgttgcatgaatggaccgttgaaatagggcctggcagggagaaattcaggaaatgaatgaatggttcttccctggcagccttgatgacttacaagccctcaaggggaagcattttctcctggactccttgatgccggagctgctggtgtttcccgcccagacagatctgcatgaacacccactgtaccgggccggacacctcattctgcaggacagggccagctgtctcccagccatgctgctggacccccgccaggctcccatgtcatcgatgcctgtgccgccccaggcaataagaccagtcacttggctgctcttctgaagaaccaagggaagatctttgcctttgacctggatgccaagcggctggcatccatggccacgctgctggcctgggttggcgtctcctgctgtgagctggctgaggaggacttcctggcggtctcccccttagatccgcgctatcgtgaggtccactatgtcctgctggatccttcctgcagtggctcgggtatgccgagcagacagctggaggatcccggggcagggacacctagcccggtgcgtctgcatgccctggcagggttccagcagcgagccctgtgccacgcgctcactttcccttccctgcagcggctcgtctactccatgtgctccctctgccaggaggagaatgaagacatggtaccagatgcgctgcagcagaacccgggcgccttcaggctagctcccgccctgcctgcccggccccaccgaggcctgagcacgttcccgggtgccgagcactgcctccgggcttcccccaagaccacgcttagcggtggcttcttcgttgctgtaattgaacgggtcgagatgccgacgtgacctcacaggccaaagcatcagcaccagaacgcaca

SEQ ID NO: 2239 - DNA, 650 bp, Artificial
  cDNA Sequence
ggaagatctttgcctttgacctggatgccaagcggctggcatccatggccacgctgctggcctgggttggcgtctcctgctgtgagctggctgaggaggacttcctggcggtctcccccttagatccgcgctatcgtgaggtccactatgtcctgctggatccttcctgcagtggctcgggtgagatggtatgccgagcagacagctggaggatcccggggcagggacacctagcccgcggctcgtctactccatgtgctccctctgccaggaggagaatgaagacatggtaccagatgcgctgcagcagaacccgggcgccttcaggctagctcccgccctgcctgcccggccccaccgaggcctgagcacgttcccgggtgccgagcactgcctccgggcttcccccaagaccacgcttagcggtggcttcttcgttgctgtaattgaacgggtcgagatgccgacctcagcctcacaggccaaagcatcagcaccagaacgcacacccagcccagccccaaagagaaagaagagacagcaaagagccgcagccggtgcttgcacaccgccttgcacatagcagaggctccaggctgactccttcctggtgggaaaggaagatgcctgtcctctccgtggaggaccct

SEQ ID NO: 2240 - DNA, 491 bp, Artificial
  cDNA Sequence
cttagttctgacactttaatgggcttgggaccctggagcaaaagttctcctctgtgaggcaaggatttcaggagcgaggatttcaggactgaggcagcctgtgaagctgtgtaaccgagacacgcttttccttaggtatgccgagcagacagctggaggatcccggggcagggacacctagcccggtgcgtctgcatgccctggcagggttccagcagcgagccctgtgccacgcgctcactttcccttccctgcagcggctcgtctactccatgtgctccctctgccaggaggagaatgaagacatggtaccagatgcgctgcagcagaacccgggcgccttcaggctagctcccgccctgcctgcccggccccaccgaggcctgagcacgttcccgggtgccgagcactgcctccgggcttcccccaagaccacgcttagcggtggcttcttcgttgctgtaattgaacgggtcgagatgccgacgtga

SEQ ID NO: 2241 - DNA, 456 bp, Artificial
  cDNA Sequence
cgtggggatcccggggcagccgagggcccctgactcggctcctcgcggcgacatggatcggatggccagctccatgaagcaggtgcccaacccactgcccaaggtgctgagccggcgcggggtcggcgctgggctggaggcggcggagcgcgagagcttcgagcggactcagcagctgcagaggagatactcggaggaggaggaaagagaagtcacggagccctgttcttaaccgagttttgcagtcacctccccgtattcctctctcactctgaagccgagcacagaacccagcctctggtggtaccgagtgaaggttggcctggttggttggatggatggccaaatgaactccagaccactggattgtataacaggacagcaagaggcagcacagagccgtggaaagaacctgtagccataacatttgatgaatgaatcagacatgtgacatta

SEQ ID NO: 2242 - DNA, 845 bp, Artificial
  cDNA Sequence
ctgctctgtcccctacatggggctgatgaagacacccagcacccctcaggtccttctccacccctaggttgaaagatctgttctaccgctccagcaacctgcagtacttcaagcggctcattcagatcccccagctgcctgagaacccacccaacttcctgcgagcctcagccctgtcagaacatatcagccctgtggtggtgatccctgcagaggcctcatcccccgacagcgagccagtcctagagaaggatgacctcatggacatggatgcctctcagcagaatttatttgacaacaagtttgatgacatctttggcagttcattcagcagtgatcccttcaatttcaacagtcaaaatggtgtgaacaaggatgagaaggaccacttaattgagcgactatacagagagatcagtggattgaaggcacagctagaaaacatgaagactgagagccagcgggttgtgctgcagctgaagggccacgtcagcgagctggaagcagatctggccgagcagcagcacctgcggcagcaggcggccgacgactgtgaattcctgcgggcagaactggacgagctcaggaggcagcgggaggacaccgagaaggctcagcggagcctgtctgagatagaaaggaaagctcaagccaatgaacagcgatatagcaagctaaaggagaagtacagcgagctggttcagaaccacgctgacctgctgcggaagaatgcagaggtgaccaaacaggtgtccatggccagacaagcccaggtagatttggaacgagagaaaaaagagctggaggattcgttggagcgcatcagtgaccagggccagcggaag

SEQ ID NO: 2243 - DNA, 796 bp, Artificial
  cDNA Sequence
gaggaattatctgctcttcggaaagaactgcaggacactcagctcaaactggccagcacagaggcaagaatctatgtgccagcttgccaaagaccaacgaaaaatgcttctggtggggtccaggaaggctgcggagcaggtgatacaagacgccctgaaccagcttgaagaacctcctctcatcagctgcgctgggtctgcagatcacctcctctccacggtcacatccatttccagctgcatcgagcaactggagaaaagctggagccagtatctggcctgcccagaagacatcagtggacttctccattccataaccctgctggcccacttgaccagcgacgccattgctcatggtgccaccacctgcctcagagccccacctgagcctgccgactcactgaccgaggcctgtaagcagtatggcagggaaaccctcgcctacctggcctccctggaggaagagggaagccttgagaatgccgacagcacagccatgaggaactgcctgagcaagatcaaggccatcggcgaggagctcctgcccaggggactggacatcaagcaggaggagctgggggacctggtggacaaggagatggcggccacttcagctgctattgaaactgccacggccagaatagaggagatgctcagcaaatcccgagcaggagacacaggagtcaaattggaggtgaatgaaaggatccttggttgctgtaccagcctcatgcaagctattcaggtgctcatcgtggcctctaaggacctccagagagagattgtggagagcggc

SEQ ID NO: 2244 - DNA, 590 bp, Artificial
  cDNA Sequence
cccctaaagagttttatgccaagaactctcgatggacagaaggacttatctcagcctccaaggctgtgggctggggagccactgtcatggtggatgcagctgatctggtggtacaaggcagagggaaatttgaggagctaatggtgtgttctcatgaaattgctgctagcacagcccagcttgtggctgcatccaaggtgaaagctgataaggacagccccaacctagcccagctgcagcaggcctctcggggagtgaaccaggccactgccggcgttgtggcctcaaccatttccggcaaatcacagatcgaagagacagacaacatggacttctcaagcatgacgctgacacagatcaaacgccaagagatggattctcaggttagggtgctagagctagaaaatgaattgcagaaggagcgtcaaaaactgggagagcttcggaaaaagcactacgagcttgctggtgttgctgagggctgggaagaaggaacagaggcatctccacctacactgcaagaagtggtaaccgaaaaagaatagagccaaaccaacaccccatatgtcagtgtaaatccttgttaccta

SEQ ID NO: 2245 - DNA, 572 bp, Artificial
  cDNA Sequence
tgcagaccagggttcgcgcgggccgggtggaggctcaagcggggaccccggagcgtgagccccggagtcggcggcgctggggccagaggggccgggagggagtcggctgaggtggcggcggaggcgaagtggcggcggaggcgaaggggcggcgggacccgggcctggcccgtatgtgtccttggcggcctagactaggccgtcgctgtatggtgagccccagggaggcggatctgggcccccagaaggacacccgcctggatttgccccgtaggcccggcccgggcccctcgggagcagaacagccttggtgaggtggacaggaggggacctcgcgagcagacgcgcgcgccagcgacagcagccccgccccggcctctcgggagccggggggcagaggctgcggagccccaggagggtctatcagccacagtctctgcatgtttccaagagcaacaggaaatgaacacattgcaggggccagtgtcattcaaagatgtggctgtggatttcacccaggaggagtggcggcaactggaccctgatgagaagatagcatacggggatgtgat

SEQ ID NO: 2246 - DNA, 525 bp, Artificial
  cDNA Sequence
tggaggctcaagcggggaccccggagcgtgagccccggagtcggcggcgctggggccagaggggccgggagggagtcggctgaggtggcggcggaggcgaagtggcggcggaggcgaaggggcggcgggacccgggcctggcccgtatgtgtccttggcggcctagactaggccgtcgctgtatggtgagccccagggaggcggatctgggcccccagaaggacacccgcctggatttgccccgtaggcccggcccgggcccctcgggagcagaacagccttggtgaggtggacaggaggggacctcgcgagcagacgcgcgcgccagcgacagcagccccgccccggcctctcgggagccggggggcagaggctgcggagccccaggagggtctatcagccacagtctctgcatgtttccaagagcaacaggaaatgaacacattgcaggggccagtgtcattcaaagatgtggctgtggatttcacccaggaggagtggcggcaactggaccctgatgagaag

SEQ ID NO: 2247 - DNA, 307 bp, Artificial
  cDNA Sequence
agcagggagaggagctgtggataacgggaggtgaatttccatgtcaacatagtcctgggatcgtgggactttaccagatcggtttgtaataacacctcgaagacgctatccgatccatcagacccagtattcctgtccgggggtacttcccacagtgtgctggaatggttatcacaagaaggctgtgctgtcccctcgcaactccaggatggtgtgtagcccagtgactgtgaggatcgcccctcctgacagaagattttcacgttctgcgataccagagcagataatcagctcaacactgtcgtca

SEQ ID NO: 2248 - DNA, 423 bp, Artificial
  cDNA Sequence
aggcctcaattctcagagctcagatgaccacttgaataagagatcccgaagctcttccatgagctccttgacaggcgcttacacaagtggcatccctagctccagccgcaatgccattaccagttcctacagctccactcgaggcatctcacagctctggaagagaaatggccccagttcatcacccttctctagcccagcctcatcccgctcccagacaccggagaggccagcaaagaaaataagagaagaagagctgtgtcatcattccagttcttcaactccattggcagcagacaaggagtcccagggagaaaagggtaggttgctgagccaggatgaggggctgctgttggtggtggaggtatttgtggaggatgtagagattaatacctattgaaaaaaggtcttgagcattgctat

SEQ ID NO: 2249 - DNA, 629 bp, Artificial
  cDNA Sequence
gctgcagatacaaccccaaggaagaaacaaaactcgaattctcagtctacacctggcagctctgggcagcgtaagcggaaagttcagctgctgccttctcggcgaggggaacagctgaccttgcctccacctccccagcttggctattcgatcactgccgaggacctagacttagagaagaaggcttcattacagtggttcaaccaggccttggaggacaagagtgatgctgcctcgaactctgtcactgagaccccacctaccactcagccttcatttacctttaccctgcctgctgctgcaactgcctccccacccacctccctcctggccccaagcaccaacccactgttagagagcttgaagaagatgcagactcccccgagcctgccaccctgcccagaatctgctggagcagcaaccactgaggccctctcacctccaaagacacccagcctcctacccccgctgggtttatcacagtcagggccgccagggctgctccccagcccctcctttgactccaaacccccgaccactttgctggggctgatccctgctccatccatggtaccagccactgacaccaaggcacctccaacccttcaagcagagacggctaccaaacc

SEQ ID NO: 2250 - DNA, 785 bp, Artificial
  cDNA Sequence
agccaccacccagaccgccagcagcgggagcagcagctcggtgtttggcagcacaacaccatcacccttcacgtttgggggttcggcagcccccgctggcagtgggagctttgggatcaacgtggccaccccaggctccagcgccaccaccggagctttcagctttggagcaggacagagtgggagcacagccacctccacccccttcacagggggcttaggtcagaacgccctgggcaccaccggccagagcacaccgtttgccttcaacgtgggcagcacaactgagagcaaacctgtgtttggaggcaccgccacccccacctttggtcagaacacccctgcgcctggagtgggcacatcgggcagcagcctctcctttggggcatcttcagcacccgcccaaggctttgttggtgttggaccgttcggatcggcggccccttcattttccattggtgcgggatccaagaccccaggggctcgacagcgactgcaggcccgaaggcagcacacccgcaaaaagtagcctttgtcccctgtccctgttccccccaccccttccctaaatctggaccttggcacgtgctagaaagagccttggacccttccagctgcgtaaagcaaacctaccccggatctctggcttcagccgccagggggcagtggcagccctggggccctttcccttctggaggaagcacaagcctcagggaaggggaagcaggatgcggagggccaaagcccgggacctctacttgaacagttccactggggaggctgga

SEQ ID NO: 2251 - DNA, 520 bp, Artificial
  cDNA Sequence
tgtaatgccgccgtcggtaggggtctgccgggcataaaggggccttcggaaccccaccagagtcacagccaggaagggcagcggggcgcaccaggccgaaggctcacgccacagggagggcagctaggacatggggggaagcgcgttaaaccagggagtcctggaaggggacgacgcccccggccagtccctgtacgagcggttaagtcagaggatgctggacatctcgggggaccggggcgtgctgaaggacgtcatccgagaaggagctggagacctagtggcgcctgatgcttcggtgctagatattacattgtggggcatggagctgggccttctgagcatgcagagaggagagctggccaggtttctgttcaaaccgaactacgcctatggaacgctgggctcccctcccttgatccccccaaacaccactgtcctgttcaagattgagctgcttgacttcctagactgtgctgagtcagacaagttttgtgctctctcagctgtacgttgcaga

SEQ ID NO: 2252 - DNA, 781 bp, Artificial
  cDNA Sequence
gtgggagccgttgagggcactttcccagtccccgaggcggatccggtgttgcatccttggagagagctgagagctcgagtacagaacctgctaaggccatcaaacctattgatcggaagtcagtccatcagatttgctctgggccggtggtactgagtctaagcactgcggtgaagaagatagtaggaaacagtctggatgctggtgccactaatattgatctaaagcttaaggactatggaatggatctcattgaagtttcaggcaatggatgtggggtagaagaagaaaacttcgaaggcttaatctctttcagctctgaaacatcacacatctaagattcgagagtttgccgacctaactcgggttgaaacttttggctttcgggggaaagctctgagctcactttgtgcactgagtgatgtcaccatttctacctgccacgtatcggcgaaggttgggactcgactggtgtttgatcacgatgggaaaatcatccagaaaaccccctacccccaccccagagggaccacagtcagcgtgaagcagttattttctacgctacctgtgcgccataaggaatttcaaaggaatattaagaaggactcctagaagtaccccaccccacccctgctccttggaggacaacgtgatcactgtattcagctctgtcaagaatggtccaggttcttctagatgatctgcacaaatggttcctctcctccttcctgatgtctgccattagcattggaataaagttcctgctgaaaatccacatctc

SEQ ID NO: 2253 - DNA, 555 bp, Artificial
  cDNA Sequence
gatctaaagcttaaggactatggaatggatctcattgaagtttcaggcaatggatgtggggtagaagaagaaaacttcgaaggcttaatctctttcagctctgaaacatcacacatctaagattcgagagtttgccgacctaactcgggttgaaacttttggctttcaggggaaagctctgagctcactttgtgcactgagtgatgtcaccatttctacctgccacgtatcggcgaaggttgggactcgactggtgtttgatcacgatgggaaaatcatccagaaaaccccctacccccaccccagagggaccacagtcagcgtgaagcagttattttctacgctacctgtgcgccataaggaatttcaaaggaatattaagaagaacctgctaaggccatcaaacctattgatcggaagtcagtccatcagatttgctctgggccggtggtactgagtctaagcactgcggtgaagaagatagtaggaaacagtctggatgctggtgccactaatattgatctaaagcttaaggactatggaatggatctcatt

SEQ ID NO: 2254 - DNA, 513 bp, Artificial
  cDNA Sequence
tggatgtggggtagaagaagaaaacttcgaaggcttaatctctttcagctctgaaacatcacacatctaagattcgagagtttgccgacctaactcgggttgaaacttttggctttcaggggaaagctctgagctcactttgtgcactgagtgatgtcaccatttctacctgccacgtatcggcgaaggttgggactcgactggtgtttgatcacgatgggaaaatcatccagaaaaccccctacccccaccccagagggaccacagtcagcgtgaagcagttattttctacgctacctgtgcgccataaggaatttcaaaggaatattaagaaggactcctagaagtaccccaccccacccctgctccttggaggacaacgtgatcactgtattcagctctgtcaagaatggtccaggttcttctagatgatctgcacaaatggttcctctcctccttcctgatgtctgccattagcattggaataaagttcctgctgaaaatccacatctc

SEQ ID NO: 2255 - DNA, 513 bp, Artificial
  cDNA Sequence
tggatgtggggtagaagaagaaaacttcgaaggcttaatctctttcagctctgaaacatcacacatctaagattcaagagtttgccgacctaactcgggttgaaacttttggctttcgggggaaagctctgagctcactttgtgcactgagtgatgtcaccatttctacctgccacgtatcggcgaaggttgggactcgactggtgtttgatcacgatgggaaaatcatccagaaaaccccctacccccaccccagagggaccacagtcagcgtgaagcagttattttctacgctacctgtgcgccataaggaatttcaaaggaatattaagaaggactcctagaagtaccccaccccacccctgctccttggaggacaacgtgatcactgtattcagctctgtcaagaatggtccaggttcttctagatgatctgcaccaatggttcctctcctccttcctgatgtctgccattagcattggaataaagttcctgctgaaaatccacatctc

SEQ ID NO: 2256 - DNA, 1052 bp, Artificial
  cDNA Sequence
gctgttcacctacggcctgatcaaacttgccttcctgtcctccaagaccagatgatgattattctccaccgtctaagagaccaaaggccaatgagctaccgcagccaccagtcccggaacccgccaatgctgggaagcggaaagtgagggagttcaacttcgagaaatggaatgctcgcatcactgatctacgtaaacaagttgaagaattgtttgaaaggaaatatgctcaagccataaaagccaaaggtccggtgacgatcccgtaccctcttttctagtctcatgttgaagatctttatgtagaaggacttcctgaaggaattccttttagaaggccatctacttacggaattcctcgcctggagaggatattacttgcaaaggaaaggattcgttttgtgattaagaaacatgagcttctgagttcaacacgtgaagatttacagcttgataagccagcttcaggagtaaaggaagaatggtatgccagaatcactaaattaagaaagatggtggatcagcttttctgcaaaaaatttgcggaagccttggggagcactgaagccaaggctgtaccgtaccaaaaatttgaggcacacccgaatgatctgtacgtggaaggactgccagaaaacattcctttccgaagtccctcatggtatggaatcccaaggctggaaaaaatcattcaagtgggcaatcgaattaaatttgttattaaaagaccagaacttctgactcacagtaccactgaagttactcagccaagaacgaatacaccaggttaacctcagcatgcttttgatttggtcaagcaatcaaagtactggtgaagaattgaagattggaagtgacacattttttgctcagggaagtaatggagaaagaaaaatcttcctggaggtagatcttcagtttggattagtctgaacatgatgaaacctgtagaaaccttcatttctcaagacaaagctcaaattcaaggttgtgaggaatgcagtcaccacttttgttaggggcagttgtgacagtgagtgactgcaaaaact

SEQ ID NO: 2257 - DNA, 1701 bp, Artificial
  cDNA Sequence
gctcaagctcttggactcaccgaggcagtaaaagtaccatatcctgtgtttgaatcaaacccggagttcttgtatgtggaaggcttgccagaggggattcccttccgaagccctacctggtttggaattccacgacttgaaaggatcgtccacgggagtaataaaatcaagttcgttgttaaaaaacctgaactagttatttcctacttgcctcctgggatggctagtaaaataaacactaaagctttgcagtcccccaaaagaccacgaagtcctgggagtaattcaaaggttcctgaaattgaggtcaccgtggaaggccctaataacaacaatcctcaaacctcagctgttcgaaccccgacccagactaacggttctaacgttcccttcaagccacgagggagagagttttcctttgaggcctggaatgccaaaatcacggacctaaaacagaaagttgaaaatctcttcaatgagaaatgtggggaagctcttggccttaaacaagctgtgaaggtgccgttcgcgttatttgagtctttcccggaagacttttatgtggaaggcttacctgagggtgtgccattccgaagaccatcgacttttggcattccgaggctggagaagatactcagaaacaaagccaaaattaagttcatcattaaaaagcccgaaatgtttgagacggcgattaaggagagcacctcctctaagagccctcccagaaaaataaattcatcacccaatgttaatactactgcatcaggtgttgaagaccttaacatcattcaggtgacaattccagatgatgataatgaaagactctcgaaagttgaaaaagctagacagctaagagaacaagtgaatgacctctttagtcggaaatttggtgaagctattggtatgggttttcctgtgaaagttccctacaggaaaatcacaattaaccctggctgtgtggtggttgatggcatgcccccgggggtgtccttcaaagcccccagctacctggaaatcagctccatgagaaggatcttagactctgccgagtttatcaaattcacggtcattagaccatttccaggacttgtgattaataaccagctggttgatcagagtgagtcagaaggccccgtgatacaagaatcagctgaaccaagccagttggaagttccagccacagaagaaataaaagagactgatggaagctctcagatcaagcaagaaccagaccccacgtggtagacctcttccctcctaggcttaaagtatcagtggttgagaagagcttttcggacctgttactaccccaagctgtgtaatatacttgtataacagaaataccttctatacaaacctttttttctacttttagatagaaatgtctactttttcagcagttctgtgaattaaagagcagagtgactgtgggtctggaatggctggtgtacttgggaatgtactatcaggattttacagcaatgctgggaaatgacagggaaaatgacaggaatgaatctcaccagattttttatgtactcagcagagccttgagttacggtgtttattttccaatcaagtgaagatatctcctacttctcctactggaacatctcagcttctgcagtgaagaaaaattcctgtgatagttcagttctttagtttttctatttgaaaaaaaaaaatcatttaaatgat

SEQ ID NO: 2258 - DNA, 1416 bp, Artificial
  cDNA Sequence
gctcaagctcttggactcaccgaggcagtaaaagtaccatatcctgtgtttgaatcaaacccggagttcttgtatgtggaaggcttgccagaggggattcccttccgaagccctacctggtttggaattccacgacttgaaaggatcgtccacgggagtaataaaatcaagttcgttgttaaaaaacctgaactagttatttcctacttgcctcctgggatggctagtaaaataaacactaaagctttgcagtcccccaaaagaccacgaagtcctgggagtaattcaaaggttcctgaaattgaggtcaccgtggaaggccctaataacaacaatcctcaaacctcagctgttcgaaccccgacccagactaacggttctaacgttcccttcaagccacgagggagagagttttcctttgaggcctggaatgccaaaatcacggacctaaaacagaaagttgaaaatctcttcaatgagaaatgtggggaagctcttggccttaaacaagctgtgaaggtgccgttcgcgttatttgagtctttcccggaagacttttatgtggaaggcttacctgagggtgtgccattccgaagaccatcgacttttggcattccgaggctggagaagatactcagaaacaaagccaaaattaagttcatcattaaaaagcccgaaatgtttgagacggcgattaaggagagcacctcctctaagagccctcccagaaaaataaattcatcacccaatgttaatactactgcatcaggtgttgaagaccttaacatcattcaggtgacaattccagatgatgataatgaaagactctcgaaagttgaaaaagctagacagctaagagaacaagtgaatgacctctttagtcggaaatttggtgaagctattggtatgggttttcctgtgaaagttccctacaggaaaatcacaattaaccctggctgtgtggtggttgatggcatgcccccgggggtgtccttcaaagcccccagctacctggaaatcagctccatgagaaggatcttagactctgccgagtttatcaaattcacggtcattagaccatttccaggacttgtgattaataaccagctggttgatcagagtgagtcagaaggccccgtgatacaagaatcagctgaaccaagccagttggaagttccagccacagaagaaataaaagagactgatggaagctctcagatcaagcaagaaccagaccccacgtggtagacctcttccctcctaggagccttgagttacggtgtttattttccaatcaagtgaagatatctcctacttctcctactggaacatctcagcttctgcagtgaagaaaaattcctgtgatagttcagttctttagtttttctatttgaaaaaaaaaaatcatttaaatga

SEQ ID NO: 2259 - DNA, 1424 bp, Artificial
  cDNA Sequence
gctcaagctcttggactcaccgaggcagtaaaagtaccatatcctgtgtttgaatcaaacccggagttcttgtatgtggaaggcttgccagaggggattcccttccgaagccctacctggtttggaattccacgacttgaaaggatcgtccacgggagtaataaaatcaagttcgttgttaaaaaacctgaactagttatttcctacttgcctcctgggatggctagtaaaataaacactaaagctttgcagtcccccaaaagaccacgaagtcctgggagtaattcaaaggttcctgaaattgaggtcaccgtggaaggccctaataacaacaatcctcaaacctcagctgttcgaaccccgacccagactaacggttctaacgttcccttcaagccacgagggagagagttttcctttgaggcctggaatgccaaaatcacggacctaaaacagaaagttgaaaatctcttcaatgagaaatgtggggaagctcttggccttaaacaagctgtgaaggtgccgttcgcgttatttgagtctttcccggaagacttttatgtggaaggcttacctgagggtgtgccattccgaagaccatcgacttttggcattccgaggctggagaagatactcagaaacaaagccaaaattaagttcatcattaaaaagcccgaaatgtttgagacggcgattaaggagagcacctcctctaagagccctcccagaaaaataaattcatcacccaatgttaatactactgcatcaggtgttgaagaccttaacatcattcaggtgacaattccagatgatgataatgaaagactctcgaaagttgaaaaagctagacagctaagagaacaagtgaatgacctctttagtcggaaatttggtgaagctattggtatgggttttcctgtgaaagttccctacaggaaaatcacaattaaccctggctgtgtggtggttgatggcatgcccccgggggtgtccttcaaagcccccagctacctggaaatcagctccatgagaaggatcttagactctgccgagtttatcaaattcacggtcattagaccatttccaggacttgtgattaataaccagctggttgatcagagtgagtcagaaggccccgtgatacaagaatcagctgaaccaagccagttggaagttccagccacagaagaaataaaagagactgatggaagctctcagatcaagcaagaaccagaccccacgtggtagacctcttccctcctaggcttaaagtatcagtggttgagaagagcttttcggacctgttactaccccaagctgtagccttgagttacggtgtttattttccaatcaagtgaagatatctcctacttctcctactggaacatctcagcttctgcagtgaagaaaaattcctgtgatag

SEQ ID NO: 2260 - DNA, 1634 bp, Artificial
  cDNA Sequence
gctcaagctcttggactcaccgaggcagtaaaagtaccatatcctgtgtttgaatcaaacccggagttcttgtatgtggaaggcttgccagaggggattcccttccgaagccctacctggtttggaattccacgacttgaaaggatcgtccacgggagtaataaaatcaagttcgttgttaaaaaacctgaactagttatttcctacttgcctcctgggatggctagtaaaataaacactaaagctttgcagtcccccaaaagaccacgaagtcctgggagtaattcaaaggttcctgaaattgaggtcaccgtggaaggccctaataacaacaatcctcaaacctcagctgttcgaaccccgacccagactaacggttctaacgttcccttcaagccacgagggagagagttttcctttgaggcctggaatgccaaaatcacggacctaaaacagaaagttgaaaatctcttcaatgagaaatgtggggaagctcttggccttaaacaagctgtgaaggtgccgttcgcgttatttgagtctttcccggaagacttttatgtggaaggcttacctgagggtgtgccattccgaagaccatcgacttttggcattccgaggctggagaagatactcagaaacaaagccaaaattaagttcatcattaaaaagcccgaaatgtttgagacggcgattaaggagagcacctcctctaagagccctcccagaaaaataaattcatcacccaatgttaatactactgcatcaggtgttgaagaccttaacatcattcaggtgacaattccagatgatgataatgaaagactctcgaaagttgaaaaagctagacagctaagagaacaagtgaatgacctctttagtcggaaatttggtgaagctattggtatgggttttcctgtgaaagttccctacaggaaaatcacaattaaccctggctgtgtggtggttgatggcatgcccccgggggtgtccttcaaagcccccagctacctggaaatcagctccatgagaaggatcttagactctgccgagtttatcaaattcacggtcattagaccatttccaggacttgtgattaataaccagctggttgatcagagtgagtcagaaggccccgtgatacaagaatcagctgaaccaagccagttggaagttccagccacagaagaaataaaagagactgatggaagctctcagatcaagcaagaaccagaccccacgtggtagacctcttccctcctagggtaaatcagcttctgtgtcagggatgctgtgtggcgtccatctgaaccccctgcatacgcgtagctaatgtgatctccccactttcacataagatggtggccctgccttcagggaatgtgggagccaggtgggagccttcccggatatttaagctagaagattctacagggagattctccttggatcaatatatgtctctcagtcaaagatgtaaaagcacttttgccttaaaaagaatgttctgtttctaaatagagtcaacgttgtcctcctcattggaattcactatgagtcagaatcattagactgacttttttttttccatagtaatagtattttgcagagtctcacagagctgcagatctttt

SEQ ID NO: 2261 - DNA, 1106 bp, Artificial
  cDNA Sequence
gctcaagctcttggactcaccgaggcagtaaaagtaccatatcctgtgtttgaatcaaacccggagttcttgtatgtggaaggcttgccagaggggattcccttccgaagccctacctggtttggaattccacgacttgaaaggatcgtccacgggagtaataaaatcaagttcgttgttaaaaaacctgaactagttatttcctacttgcctcctgggatggctagtaaaataaacactaaagctttgcagtcccccaaaagaccacgaagtcctgggagtaattcaaaggttcctgaaattgaggtcaccgtggaaggccctaataacaacaatcctcaaacctcagctgttcgaaccccgacccagactaacggttctaacgttcccttcaagccacgagggagagagttttcctttgaggcctggaatgccaaaatcacggacctaaaacagaaagttgaaaatctcttcaatgagaaatgtggggaagctcttggccttaaacaagctgtgaaggtgccgttcgcgttatttgagtctttcccggaagacttttatgtggaaggcttacctgagggtgtgccattccgaagaccatcgacttttggcattccgaggctggagaagatactcagaaacaaagccaaaattaagttcatcattaaaaagcccgaaatgtttgagacggcgattaaggagagcacctcctctaagagccctcccagaaaaataaattcatcacccaatgttaatactactgcatcaggtgttgaagaccttaacatcattcaggtgacaattccagatgatgataatgaaagactctcgaaagttgaaaaagctagacagctaagagaacaagtgaatgacctctttagtcggaaatttggtgaagctattggtatgggttttcctgtgaaagttccctacaggaaaatcacaattaaccctggctgtgtggtggttgatggcatgcccccgggggtgtccttcaaagcccccagctacctggaaatcagctccatgagaaggatcttagactctgccgagtttatcaaattcacggtcattagaccatttccaggacttgtgattaataaccg

SEQ ID NO: 2262 - DNA, 1518 bp, Artificial
  cDNA Sequence
agacctgaactagttatttcctacttgcctcctgggatggctagtaaaataaacactaaagctttgcagtcccccaaaagaccacgaagtcctgggagtaattcaaaggttcctgaaattgaggtcaccgtggaaggccctaataacaacaatcctcaaacctcagctgttcgaaccccgacccagactaacggttctaacgttcccttcaagccacgagggagagagttttcctttgaggcctggaatgccaaaatcacggacctaaaacagaaagttgaaaatctcttcaatgagaaatgtggggaagctcttggccttaaacaagctgtgaaggtgccgttcgcgttatttgagtctttcccggaagacttttatgtggaaggcttacctgagggtgtgccattccgaagaccatcgacttttggcattccgaggctggagaagatactcagaaacaaagccaaaattaagttcatcattaaaaagcccgaaatgtttgagacggcgattaaggagagcacctcctctaagagccctcccagaaaaataaattcatcacccaatgttaatactactgcatcaggtgttgaagaccttaacatcattcaggtgacaattccagatgatgataatgaaagactctcgaaagttgaaaaagctagacagctaagagaacaagtgaatgacctctttagtcggaaatttggtgaagctattggtatgggttttcctgtgaaagttccctacaggaaaatcacaattaaccctggctgtgtggtggttgatggcatgcccccgggggtgtccttcaaagcccccagctacctggaaatcagctccatgagaaggatcttagactctgccgagtttatcaaattcacggtcattagaccatttccaggacttgtgattaataaccagctggttgatcagagtgagtcagaaggccccgtgatacaagaatcagctgaaccaagccagttggaagttccagccacagaagaaataaaagagactgatggaagctctcagatcaagcaagaaccagaccccacgtggtagacctcttccctcctaggcttaaagtatcagtggttgagaagagcttttcggacctgttactaccccaagctgtgtaatatacttgtataacagaaataccttctatacaaacctttttttctacttttagatagaaatgtctactttttcagcagttctgtgaattaaagagcagagtgactgtgggtctggaatggctggtgtacttgggaatgtactatcaggattttacagcaatgctgggaaatgacagggaaaatgacaggaatgaatctcaccagattttttatgtactcagcagagccttgagttacggtgtttattttccaatcaagtgaagatatctcctacttctcctactggaacatctcagcttctgcagtgaagaaaaattcctgtgatagttcagttctttagtttttctatttgaaaaaaaaaaatcatttaaatgat

SEQ ID NO: 2263 - DNA, 1233 bp, Artificial; identical to SEQ ID NO: 2056
  cDNA Sequence

SEQ ID NO: 2264 - DNA, 1241 bp, Artificial; identical to SEQ ID NO: 2058
  cDNA Sequence

SEQ ID NO: 2265 - DNA, 1451 bp, Artificial
  cDNA Sequence
agacctgaactagttatttcctacttgcctcctgggatggctagtaaaataaacactaaagctttgcagtcccccaaaagaccacgaagtcctgggagtaattcaaaggttcctgaaattgaggtcaccgtggaaggccctaataacaacaatcctcaaacctcagctgttcgaaccccgacccagactaacggttctaacgttcccttcaagccacgagggagagagttttcctttgaggcctggaatgccaaaatcacggacctaaaacagaaagttgaaaatctcttcaatgagaaatgtggggaagctcttggccttaaacaagctgtgaaggtgccgttcgcgttatttgagtctttcccggaagacttttatgtggaaggcttacctgagggtgtgccattccgaagaccatcgacttttggcattccgaggctggagaagatactcagaaacaaagccaaaattaagttcatcattaaaaagcccgaaatgtttgagacggcgattaaggagagcacctcctctaagagccctcccagaaaaataaattcatcacccaatgttaatactactgcatcaggtgttgaagaccttaacatcattcaggtgacaattccagatgatgataatgaaagactctcgaaagttgaaaaagctagacagctaagagaacaagtgaatgacctctttagtcggaaatttggtgaagctattggtatgggttttcctgtgaaagttccctacaggaaaatcacaattaaccctggctgtgtggtggttgatggcatgcccccgggggtgtccttcaaagcccccagctacctggaaatcagctccatgagaaggatcttagactctgccgagtttatcaaattcacggtcattagaccatttccaggacttgtgattaataaccagctggttgatcagagtgagtcagaaggccccgtgatacaagaatcagctgaaccaagccagttggaagttccagccacagaagaaataaaagagactgatggaagctctcagatcaagcaagaaccagaccccacgtggtagacctcttccctcctagggtaaatcagcttctgtgtcagggatgctgtgtggcgtccatctgaaccccctgcatacgcgtagctaatgtgatctccccactttcacataagatggtggccctgccttcagggaatgtgggagccaggtgggagccttcccggatatttaagctagaagattctacagggagattctccttggatcaatatatgtctctcagtcaaagatgtaaaagcacttttgccttaaaaagaatgttctgtttctaaatagagtcaacgttgtcctcctcattggaattcactatgagtcagaatcattagactgacttttttttttccatagtaatagtattttgcagagtctcacagagctgcagatctttt

SEQ ID NO: 2266 - DNA, 923 bp, Artificial; identical to SEQ ID NO: 2060
  cDNA Sequence

SEQ ID NO: 2267 - DNA, 789 bp, Artificial; identical to SEQ ID NO: 2061
  cDNA Sequence

SEQ ID NO: 2268 - DNA, 1747 bp, Artificial
  cDNA Sequence
taccaagctacggaagcaagtggaagagatttttaatttgaaatttgctcaagctcttggactcaccgaggcagtaaaagtaccatatcctgtgtttgaatcaaacccggagttcttgtatgtggaaggcttgccagaggggattcccttccgaagccctacctggtttggaattccacgacttgaaaggatcgtccacgggagtaataaaatcaagttcgttgttaaaaaacctgaactagttatttcctacttgcctcctgggatggctagtaaaataaacactaaagctttgcagtcccccaaaagaccacgaagtcctgggagtaattcaaaggttcctgaaattgaggtcaccgtggaaggccctaataacaacaatcctcaaacctcagctgttcgaaccccgacccagactaacggttctaacgttcccttcaagccacgagggagagagttttcctttgaggcctggaatgccaaaatcacggacctaaaacagaaagttgaaaatctcttcaatgagaaatgtggggaagctcttggccttaaacaagctgtgaaggtgccgttcgcgttatttgagtctttcccggaagacttttatgtggaaggcttacctgagggtgtgccattccgaagaccatcgacttttggcattccgaggctggagaagatactcagaaacaaagccaaaattaagttcatcattaaaaagcccgaaatgtttgagacggcgattaaggagagcacctcctctaagagccctcccagaaaaataaattcatcacccaatgttaatactactgcatcaggtgttgaagaccttaacatcattcaggtgacaattccagatgatgataatgaaagactctcgaaagttgaaaaagctagacagctaagagaacaagtgaatgacctctttagtcggaaatttggtgaagctattggtatgggttttcctgtgaaagttccctacaggaaaatcacaattaaccctggctgtgtggtggttgatggcatgcccccgggggtgtccttcaaagcccccagctacctggaaatcagctccatgagaaggatcttagactctgccgagtttatcaaattcacggtcattagaccatttccaggacttgtgattaataaccagctggttgatcagagtgagtcagaaggccccgtgatacaagaatcagctgaaccaagccagttggaagttccagccacagaagaaataaaagagactgatggaagctctcagatcaagcaagaaccagaccccacgtggtagacctcttccctcctaggcttaaagtatcagtggttgagaagagcttttcggacctgttactaccccaagctgtgtaatatacttgtataacagaaataccttctatacaaacctttttttctacttttagatagaaatgtctactttttcagcagttctgtgaattaaagagcagagtgactgtgggtctggaatggctggtgtacttgggaatgtactatcaggattttacagcaatgctgggaaatgacagggaaaatgacaggaatgaatctcaccagattttttatgtactcagcagagccttgagttacggtgtttattttccaatcaagtgaagatatctcctacttctcctactggaacatctcagcttctgcagtgaagaaaaattcctgtgatagttcagttctttagtttttctatttgaaaaaaaaaaatcatttaaatgat

SEQ ID NO: 2269 - DNA, 1462 bp, Artificial
  cDNA Sequence
taccaagctacggaagcaagtggaagagatttttaatttgaaatttgctcaagctcttggactcaccgaggcagtaaaagtaccatatcctgtgtttgaatcaaacccggagttcttgtatgtggaaggcttgccagaggggattcccttccgaagccctacctggtttggaattccacgacttgaaaggatcgtccacgggagtaataaaatcaagttcgttgttaaaaaacctgaactagttatttcctacttgcctcctgggatggctagtaaaataaacactaaagctttgcagtcccccaaaagaccacgaagtcctgggagtaattcaaaggttcctgaaattgaggtcaccgtggaaggccctaataacaacaatcctcaaacctcagctgttcgaaccccgacccagactaacggttctaacgttcccttcaagccacgagggagagagttttcctttgaggcctggaatgccaaaatcacggacctaaaacagaaagttgaaaatctcttcaatgagaaatgtggggaagctcttggccttaaacaagctgtgaaggtgccgttcgcgttatttgagtctttcccggaagacttttatgtggaaggcttacctgagggtgtgccattccgaagaccatcgacttttggcattccgaggctggagaagatactcagaaacaaagccaaaattaagttcatcattaaaaagcccgaaatgtttgagacggcgattaaggagagcacctcctctaagagccctcccagaaaaataaattcatcacccaatgttaatactactgcatcaggtgttgaagaccttaacatcattcaggtgacaattccagatgatgataatgaaagactctcgaaagttgaaaaagctagacagctaagagaacaagtgaatgacctctttagtcggaaatttggtgaagctattggtatgggttttcctgtgaaagttccctacaggaaaatcacaattaaccctggctgtgtggtggttgatggcatgcccccgggggtgtccttcaaagcccccagctacctggaaatcagctccatgagaaggatcttagactctgccgagtttatcaaattcacggtcattagaccatttccaggacttgtgattaataaccagctggttgatcagagtgagtcagaaggccccgtgatacaagaatcagctgaaccaagccagttggaagttccagccacagaagaaataaaagagactgatggaagctctcagatcaagcaagaaccagaccccacgtggtagacctcttccctcctaggagccttgagttacggtgtttattttccaatcaagtgaagatatctcctacttctcctactggaacatctcagcttctgcagtgaagaaaaattcctgtgatagttcagttctttagtttttctatttgaaaaaaaaaaatcatttaaatga

SEQ ID NO: 2270 - DNA, 1470 bp, Artificial
  cDNA Sequence
taccaagctacggaagcaagtggaagagatttttaatttgaaatttgctcaagctcttggactcaccgaggcagtaaaagtaccatatcctgtgtttgaatcaaacccggagttcttgtatgtggaaggcttgccagaggggattcccttccgaagccctacctggtttggaattccacgacttgaaaggatcgtccacgggagtaataaaatcaagttcgttgttaaaaaacctgaactagttatttcctacttgcctcctgggatggctagtaaaataaacactaaagctttgcagtcccccaaaagaccacgaagtcctgggagtaattcaaaggttcctgaaattgaggtcaccgtggaaggccctaataacaacaatcctcaaacctcagctgttcgaaccccgacccagactaacggttctaacgttcccttcaagccacgagggagagagttttcctttgaggcctggaatgccaaaatcacggacctaaaacagaaagttgaaaatctcttcaatgagaaatgtggggaagctcttggccttaaacaagctgtgaaggtgccgttcgcgttatttgagtctttcccggaagacttttatgtggaaggcttacctgagggtgtgccattccgaagaccatcgacttttggcattccgaggctggagaagatactcagaaacaaagccaaaattaagttcatcattaaaaagcccgaaatgtttgagacggcgattaaggagagcacctcctctaagagccctcccagaaaaataaattcatcacccaatgttaatactactgcatcaggtgttgaagaccttaacatcattcaggtgacaattccagatgatgataatgaaagactctcgaaagttgaaaaagctagacagctaagagaacaagtgaatgacctctttagtcggaaatttggtgaagctattggtatgggttttcctgtgaaagttccctacaggaaaatcacaattaaccctggctgtgtggtggttgatggcatgcccccgggggtgtccttcaaagcccccagctacctggaaatcagctccatgagaaggatcttagactctgccgagtttatcaaattcacggtcattagaccatttccaggacttgtgattaataaccagctggttgatcagagtgagtcagaaggccccgtgatacaagaatcagctgaaccaagccagttggaagttccagccacagaagaaataaaagagactgatggaagctctcagatcaagcaagaaccagaccccacgtggtagacctcttccctcctaggcttaaagtatcagtggttgagaagagcttttcggacctgttactaccccaagctgtagccttgagttacggtgtttattttccaatcaagtgaagatatctcctacttctcctactggaacatctcagcttctgcagtgaagaaaaattcctgtgatag

SEQ ID NO: 2271 - DNA, 1680 bp, Artificial
  cDNA Sequence
taccaagctacggaagcaagtggaagagatttttaatttgaaatttgctcaagctcttggactcaccgaggcagtaaaagtaccatatcctgtgtttgaatcaaacccggagttcttgtatgtggaaggcttgccagaggggattcccttccgaagccctacctggtttggaattccacgacttgaaaggatcgtccacgggagtaataaaatcaagttcgttgttaaaaaacctgaactagttatttcctacttgcctcctgggatggctagtaaaataaacactaaagctttgcagtcccccaaaagaccacgaagtcctgggagtaattcaaaggttcctgaaattgaggtcaccgtggaaggccctaataacaacaatcctcaaacctcagctgttcgaaccccgacccagactaacggttctaacgttcccttcaagccacgagggagagagttttcctttgaggcctggaatgccaaaatcacggacctaaaacagaaagttgaaaatctcttcaatgagaaatgtggggaagctcttggccttaaacaagctgtgaaggtgccgttcgcgttatttgagtctttcccggaagacttttatgtggaaggcttacctgagggtgtgccattccgaagaccatcgacttttggcattccgaggctggagaagatactcagaaacaaagccaaaattaagttcatcattaaaaagcccgaaatgtttgagacggcgattaaggagagcacctcctctaagagccctcccagaaaaataaattcatcacccaatgttaatactactgcatcaggtgttgaagaccttaacatcattcaggtgacaattccagatgatgataatgaaagactctcgaaagttgaaaaagctagacagctaagagaacaagtgaatgacctctttagtcggaaatttggtgaagctattggtatgggttttcctgtgaaagttccctacaggaaaatcacaattaaccctggctgtgtggtggttgatggcatgcccccgggggtgtccttcaaagcccccagctacctggaaatcagctccatgagaaggatcttagactctgccgagtttatcaaattcacggtcattagaccatttccaggacttgtgattaataaccagctggttgatcagagtgagtcagaaggccccgtgatacaagaatcagctgaaccaagccagttggaagttccagccacagaagaaataaaagagactgatggaagctctcagatcaagcaagaaccagaccccacgtggtagacctcttccctcctagggtaaatcagcttctgtgtcagggatgctgtgtggcgtccatctgaaccccctgcatacgcgtagctaatgtgatctccccactttcacataagatggtggccctgccttcagggaatgtgggagccaggtgggagccttcccggatatttaagctagaagattctacagggagattctccttggatcaatatatgtctctcagtcaaagatgtaaaagcacttttgccttaaaaagaatgttctgtttctaaatagagtcaacgttgtcctcctcattggaattcactatgagtcagaatcattagactgacttttttttttccatagtaatagtattttgcagagtctcacagagctgcagatctttt

SEQ ID NO: 2272 - DNA, 1152 bp, Artificial
  cDNA Sequence
taccaagctacggaagcaagtggaagagatttttaatttgaaatttgctcaagctcttggactcaccgaggcagtaaaagtaccatatcctgtgtttgaatcaaacccggagttcttgtatgtggaaggcttgccagaggggattcccttccgaagccctacctggtttggaattccacgacttgaaaggatcgtccacgggagtaataaaatcaagttcgttgttaaaaaacctgaactagttatttcctacttgcctcctgggatggctagtaaaataaacactaaagctttgcagtcccccaaaagaccacgaagtcctgggagtaattcaaaggttcctgaaattgaggtcaccgtggaaggccctaataacaacaatcctcaaacctcagctgttcgaaccccgacccagactaacggttctaacgttcccttcaagccacgagggagagagttttcctttgaggcctggaatgccaaaatcacggacctaaaacagaaagttgaaaatctcttcaatgagaaatgtggggaagctcttggccttaaacaagctgtgaaggtgccgttcgcgttatttgagtctttcccggaagacttttatgtggaaggcttacctgagggtgtgccattccgaagaccatcgacttttggcattccgaggctggagaagatactcagaaacaaagccaaaattaagttcatcattaaaaagcccgaaatgtttgagacggcgattaaggagagcacctcctctaagagccctcccagaaaaataaattcatcacccaatgttaatactactgcatcaggtgttgaagaccttaacatcattcaggtgacaattccagatgatgataatgaaagactctcgaaagttgaaaaagctagacagctaagagaacaagtgaatgacctctttagtcggaaatttggtgaagctattggtatgggttttcctgtgaaagttccctacaggaaaatcacaattaaccctggctgtgtggtggttgatggcatgcccccgggggtgtccttcaaagcccccagctacctggaaatcagctccatgagaaggatcttagactctgccgagtttatcaaattcacggtcattagaccatttccaggacttgtgattaataaccg

SEQ ID NO: 2273 - DNA, 2976 bp, Artificial
  cDNA Sequence
tgcctcctggcggctcctgaactccagccccctctctatcagccgctcactccgtctcaatatgtctcaagatggcggccaatgtgggatcgatgtttcaatattggaagcgctttgatttacagcagctgcagagagaactcgatgccaccgcaacggtattggcgaaccggcaggatgaaagtgagcagtccagaaagcggcttatcgaacagagccgggagttcaagaagaacactccagaggatttgcgcaagcaggtagcgccgctgctgaagagtttccaaggagagattgatgcactgagtaaaagaagcaaggaagctgaagcagctttcttgaatgtctacaaaagattgattgacgtcccagatcccgtaccagctttggatctcggacagcaactccagctcaaagtgcagcgcctgcacgatattgaaacagagaaccagaaacttagggaaactctggaagaatacaacaaggaatttgctgaagtgaaaaatcaagaggttacgataaaagcacttaaagagaaaatccgagaatatgaacagacactgaagaaccaagccgaaaccatagctcttgagaaggaacagaagttacagaatgactttgcagaaaaggagagaaagctgcaggagacacagatgtccaccacctcaaagctggaggaagctgagcataaggttcagagcctacaaacagccctggaaaaaactcgaacagaattatttgacctgaaaaccaaatacgatgaagaaactactgcaaaggccgacgagattgaaatgatcatgacggaccttgaaagggcaaaccagagggcagaggtggctcagagagaggcggagaccttaagggaacagctctcatcggccaatcactccctccagctggcctcacagatccagaaggcaccagacgtggagcaggccatagaggtgctgacccgctccagcctagaagttgagttggccgccaaggagcgggagatcgcacagctggtggaggacgtgcagagactccaggccagcctcaccaagctgcgggagaattcggccagccagatctcacagcttgagcagcagctgagcgccaaaaacagcacactcaaacaactggaagaaaaactcaaaggccaggctgactatgaagaggtgaagaaagagctgaacattctgaagtccatggagtttgcaccgtccgagggcgctgggacacaggatgcggccaagcccctggaggtgctgttgctggagaagaaccgctcgctgcagtccgagaacgccgcgctgcgcatctccaacagcgacctgagcggacgctgtgcagagctgcaagtccgtatcactgaggctgtggccacagccactgagcagagagagctgatcgcccgcctggagcaggacctgagcatcattcagtccatccagcggcccgatgccgagggtgccgctgagcaccgcctggagaagatcccagagcccatcaaagaggccactgccctattctacggacctgcagcaccagccagcggtgccctcccagagggccaggtggattcactgctttccatcatctccagccagagggagcgcttccgtgcccggaaccaggagcttgaggccgagaaccgcctggcccagcacaccctccaggccctgcagagtgagctggacagcctgcgcgccgacaacatcaagctctttgagaagatcaagttcctgcagagctaccctggccggggcagcggcagtgatgacacggagctgcggtactcgtcccagtacgaggagcgcctggaccccttctcctccttcagcaagcgggagcggcagaggaagtacctgagcttgagtccctgggacaaggccaccctcagcatggggcgtctggttctctccaacaagatggcgcgcaccatcggcttcttctacacactgttcctgcactgcctggtcttcctggtgctctacaagctggcatggagcgagagcatggagagggactgtgccaccttctgcgccaagaagttcgctgaccacctgcacaagttccacgagaatgacaacggggctgcggctggtgacttgtggcagtgataccccggggcctcccccgtgacagtgacggctgcgcctccaccccgactgctcagtgcatctaatcacttagactcccctgaagaatcccccatggaaactgcccttatccgctgtccagcagctgccagaggccccaggtcacctcgggtccccttgaaagaatgtctcggtcacatcaggcccgctaggtccagagagcgagcccccaatgcccggccaggctaagccgcagagaccctctcagcccccacctcaggttagggctctgcccgcagcctgacctctagccctggtggcagaggtccctcagctgcgaggctaattgggtgaccaccgattccagctgcggttaatccagcttgggcctgtctgcactgcgatcctcttgggctctcctaggatccccccatgccccgtaagaggtggaagacgcttccttccaggacagcaggctttgagtccagcacccccagcctgcctttgccaccagccccaccctgcagagtatatgaggcttgacagagtctgccccctcccccactgcaccccaagagagagagccccagccagcggaacagtttctattaccccctccctgcccccagacccatgtgatttctgctttcttctttagcaagatattctggtttctagataaggaagagtctctaatgagcccccgagccccagtctcttcagactcatggattggtctgaggggtctgaacgtctcctagccaatcagaactggctgtggaccaccctagcacggccacctctcagggccactggcaggccttcctgagttagatttgtagttgcatatttagctttgcacatttgaaataaaccacggttgcagcca

SEQ ID NO: 2274 - DNA, 1976 bp, Artificial
  cDNA Sequence
tgcctcctggcggctcctgaactccagccccctctctatcagccgctcactccgtctcaatatgtctcaagatggcggccaatgtgggatcgatgtttcaatattggaagcgctttgatttacagcagctgcagagagaactcgatgccaccgcaacggtattggcgaaccggcaggatgaaagtgagcagtccagaaagcggcttatcgaacagagccgggagttcaagaagaacactccagaggatttgcgcaagcaggtagcgccgctgctgaagagtttccaaggagagattgatgcactgagtaaaagaagcaaggaagctgaagcagctttcttgaatgtctacaaaagattgattgacgtcccagatcccgtaccagctttggatctcggacagcaactccagctcaaagtgcagcgcctgcacgatattgaaacagagaaccagaaacttagggaaactctggaagaatacaacaaggaatttgctgaagtgaaaaatcaagaggttacgataaaagcacttaaagagaaaatccgagaatatgaacagacactgaagaaccaagccgaaaccatagctcttgagaaggaacagaagttacagaatgactttgcagaaaaggagagaaagctgcaggagacacagatgtccaccacctcaaagctggaggaagctgagcataaggttcagagcctacaaacagccctggaaaaaactcgaacagaattatttgacctgaaaaccaaatacgatgaagaaactactgcaaaggccgacgagattgaaatgatcatgacggaccttgaaagggcaaaccagagggcagaggtggctcagagagaggcggagaccttaagggaacagctctcatcggccaatcactccctccagctggcctcacagatccagaaggcaccagacgtggagcaggccatagaggtgctgacccgctccagcctagaagttgagttggccgccaaggagcgggagatcgcacagctggtggaggacgtgcagagactccaggccagcctcaccaagctgcgggagaattcggccagccagatctcacagcttgagcagcagctgagcgccaaaaacagcacactcaaacaactggaagaaaaactcaaaggccaggctgactatgaagaggtgaagaaagagctgaacattctgaagtccatggagtttgcaccgtccgagggcgctgggacacaggatgcggccaagcccctggaggtgctgttgctggagaagaaccgctcgctgcagtccgagaacgccgcgctgcgcatctccaacagcgacctgagcggacgctgtgcagagctgcaagtccgtatcactgaggctgtggccacagccactgagcagagagagctgatcgcccgcctggagcaggacctgagcatcattcagtccatccagcggcccgatgccgagggtgccgctgagcaccgcctggagaagatcccagagcccatcaaagaggccactgccctattctacggacctgcagcaccagccagcggtgccctcccagagggccaggtggattcactgctttccatcatctccagccagagggagcgcttccgtgcccggaaccaggagcttgaggccgagaaccgcctggcccagcacaccctccaggccctgcagagtgagctggacagcctgcgcgccgacaacatcaagctctttgagaagatcaagttcctgcagagctaccctggccggggcagcggcagtgatgacacggagctgcggtactcgtcccagtacgaggagcgcctggaccccttctcctccttcagcaagcgggagcggcagaggaagtacctgagcttgagtccctgggacaaggccaccctcagcatggggcgtctggttctctccaacaagatggcgcgcaccatcggcttcttctacacactgttcctgcactgcctggtcttcctggtg

SEQ ID NO: 2275 - DNA, 1563 bp, Artificial
  cDNA Sequence
tgcctcctggcggctcctgaactccagccccctctctatcagccgctcactccgtctcaatatgtctcaagatggcggccaatgtgggatcgatgtttcaatattggaagcgctttgatttacagcagctgcagagagaactcgatgccaccgcaacggtattggcgaaccggcaggatgaaagtgagcagtccagaaagcggcttatcgaacagagccgggagttcaagaagaacactccagaggatttgcgcaagcaggtagcgccgctgctgaagagtttccaaggagagattgatgcactgagtaaaagaagcaaggaagctgaagcagctttcttgaatgtctacaaaagattgattgacgtcccagatcccgtaccagctttggatctcggacagcaactccagctcaaagtgcagcgcctgcacgatattgaaacagagaaccagaaacttagggaaactctggaagaatacaacaaggaatttgctgaagtgaaaaatcaagaggttacgataaaagcacttaaagagaaaatccgagaatatgaacagacactgaagaaccaagccgaaaccatagctcttgagaaggaacagaagttacagaatgactttgcagaaaaggagagaaagctgcaggagacacagatgtccaccacctcaaagctggaggaagctgagcataaggttcagagcctacaaacagccctggaaaaaactcgaacagaattatttgacctgaaaaccaaatacgatgaagaaactactgcaaaggccgacgagattgaaatgatcatgacggaccttgaaagggcaaaccagagggcagaggtggctcagagagaggcggagaccttaagggaacagctctcatcggccaatcactccctccagctggcctcacagatccagaaggcaccagacgtggagcaggccatagaggtgctgacccgctccagcctagaagttgagttggccgccaaggagcgggagatcgcacagctggtggaggacgtgcagagactccaggccagcctcaccaagctgcgggagaattcggccagccagatctcacagcttgagcagcagctgagcgccaaaaacagcacactcaaacaactggaagaaaaactcaaaggccaggctgactatgaagaggtgaagaaagagctgaacattctgaagtccatggagtttgcaccgtccgagggcgctgggacacaggatgcggccaagcccctggaggtgctgttgctggagaagaaccgctcgctgcagtccgagaacgccgcgctgcgcatctccaacagcgacctgagcggtccatacagcacaaactccatatcttcccaaagtccattacaacaaagcccagatgtcaatggcatggccccatcccccagccagtcagaaagtgctgggagcgtctccgagggcgaggagatggacactgcagaaatcgcccggcaggtcaaagagcagctgattaagcacaatatcggacaacgtattttcggacattatgtgttgggactgtctcaagggtccgtgagcgaga

SEQ ID NO: 2276 - DNA, 263 bp, Artificial
  cDNA Sequence
gcagtccagaaagcggcttatcgaacagagccgggagttcaagaagaacactccagaggatttgcgcaagcaggtagcgccgctgctgaagagtttccaaggagaggtaagcttttctattcattttctatcctgagccacccttcgtggctaattggtctttttattcacattaaagaaatgctccgggcaaaaggtgctgcccagatggtgccttcccggctgctccgacccagcgtcatgcagattttgcgctctgtgat

SEQ ID NO: 2277 - DNA, 2685 bp, Artificial
  cDNA Sequence
agattgatgcactgagtaaaagaagcaaggaagctgaagcagctttcttgaatgtctacaaaagattgattgacgtcccagatcccgtaccagctttggatctcggacagcaactccagctcaaagtgcagcgcctgcacgatattgaaacagagaaccagaaacttagggaaactctggaagaatacaacaaggaatttgctgaagtgaaaaatcaagaggttacgataaaagcacttaaagagaaaatccgagaatatgaacagacactgaagaaccaagccgaaaccatagctcttgagaaggaacagaagttacagaatgactttgcagaaaaggagagaaagctgcaggagacacagatgtccaccacctcaaagctggaggaagctgagcataaggttcagagcctacaaacagccctggaaaaaactcgaacagaattatttgacctgaaaaccaaatacgatgaagaaactactgcaaaggccgacgagattgaaatgatcatgacggaccttgaaagggcaaaccagagggcagaggtggctcagagagaggcggagaccttaagggaacagctctcatcggccaatcactccctccagctggcctcacagatccagaaggcaccagacgtggagcaggccatagaggtgctgacccgctccagcctagaagttgagttggccgccaaggagcgggagatcgcacagctggtggaggacgtgcagagactccaggccagcctcaccaagctgcgggagaattcggccagccagatctcacagcttgagcagcagctgagcgccaaaaacagcacactcaaacaactggaagaaaaactcaaaggccaggctgactatgaagaggtgaagaaagagctgaacattctgaagtccatggagtttgcaccgtccgagggcgctgggacacaggatgcggccaagcccctggaggtgctgttgctggagaagaaccgctcgctgcagtccgagaacgccgcgctgcgcatctccaacagcgacctgagcggacgctgtgcagagctgcaagtccgtatcactgaggctgtggccacagccactgagcagagagagctgatcgcccgcctggagcaggacctgagcatcattcagtccatccagcggcccgatgccgagggtgccgctgagcaccgcctggagaagatcccagagcccatcaaagaggccactgccctattctacggacctgcagcaccagccagcggtgccctcccagagggccaggtggattcactgctttccatcatctccagccagagggagcgcttccgtgcccggaaccaggagcttgaggccgagaaccgcctggcccagcacaccctccaggccctgcagagtgagctggacagcctgcgcgccgacaacatcaagctctttgagaagatcaagttcctgcagagctaccctggccggggcagcggcagtgatgacacggagctgcggtactcgtcccagtacgaggagcgcctggaccccttctcctccttcagcaagcgggagcggcagaggaagtacctgagcttgagtccctgggacaaggccaccctcagcatggggcgtctggttctctccaacaagatggcgcgcaccatcggcttcttctacacactgttcctgcactgcctggtcttcctggtgctctacaagctggcatggagcgagagcatggagagggactgtgccaccttctgcgccaagaagttcgctgaccacctgcacaagttccacgagaatgacaacggggctgcggctggtgacttgtggcagtgataccccggggcctcccccgtgacagtgacggctgcgcctccaccccgactgctcagtgcatctaatcacttagactcccctgaagaatcccccatggaaactgcccttatccgctgtccagcagctgccagaggccccaggtcacctcgggtccccttgaaagaatgtctcggtcacatcaggcccgctaggtccagagagcgagcccccaatgcccggccaggctaagccgcagagaccctctcagcccccacctcaggttagggctctgcccgcagcctgacctctagccctggtggcagaggtccctcagctgcgaggctaattgggtgaccaccgattccagctgcggttaatccagcttgggcctgtctgcactgcgatcctcttgggctctcctaggatccccccatgccccgtaagaggtggaagacgcttccttccaggacagcaggctttgagtccagcacccccagcctgcctttgccaccagccccaccctgcagagtatatgaggcttgacagagtctgccccctcccccactgcaccccaagagagagagccccagccagcggaacagtttctattaccccctccctgcccccagacccatgtgatttctgctttcttctttagcaagatattctggtttctagataaggaagagtctctaatgagcccccgagccccagtctcttcagactcatggattggtctgaggggtctgaacgtctcctagccaatcagaactggctgtggaccaccctagcacggccacctctcagggccactggcaggccttcctgagttagatttgtagttgcatatttagctttgcacatttgaaataaaccacggttgcagcca

SEQ ID NO: 2278 - DNA, 1685 bp, Artificial
  cDNA Sequence
agattgatgcactgagtaaaagaagcaaggaagctgaagcagctttcttgaatgtctacaaaagattgattgacgtcccagatcccgtaccagctttggatctcggacagcaactccagctcaaagtgcagcgcctgcacgatattgaaacagagaaccagaaacttagggaaactctggaagaatacaacaaggaatttgctgaagtgaaaaatcaagaggttacgataaaagcacttaaagagaaaatccgagaatatgaacagacactgaagaaccaagccgaaaccatagctcttgagaaggaacagaagttacagaatgactttgcagaaaaggagagaaagctgcaggagacacagatgtccaccacctcaaagctggaggaagctgagcataaggttcagagcctacaaacagccctggaaaaaactcgaacagaattatttgacctgaaaaccaaatacgatgaagaaactactgcaaaggccgacgagattgaaatgatcatgacggaccttgaaagggcaaaccagagggcagaggtggctcagagagaggcggagaccttaagggaacagctctcatcggccaatcactccctccagctggcctcacagatccagaaggcaccagacgtggagcaggccatagaggtgctgacccgctccagcctagaagttgagttggccgccaaggagcgggagatcgcacagctggtggaggacgtgcagagactccaggccagcctcaccaagctgcgggagaattcggccagccagatctcacagcttgagcagcagctgagcgccaaaaacagcacactcaaacaactggaagaaaaactcaaaggccaggctgactatgaagaggtgaagaaagagctgaacattctgaagtccatggagtttgcaccgtccgagggcgctgggacacaggatgcggccaagcccctggaggtgctgttgctggagaagaaccgctcgctgcagtccgagaacgccgcgctgcgcatctccaacagcgacctgagcggacgctgtgcagagctgcaagtccgtatcactgaggctgtggccacagccactgagcagagagagctgatcgcccgcctggagcaggacctgagcatcattcagtccatccagcggcccgatgccgagggtgccgctgagcaccgcctggagaagatcccagagcccatcaaagaggccactgccctattctacggacctgcagcaccagccagcggtgccctcccagagggccaggtggattcactgctttccatcatctccagccagagggagcgcttccgtgcccggaaccaggagcttgaggccgagaaccgcctggcccagcacaccctccaggccctgcagagtgagctggacagcctgcgcgccgacaacatcaagctctttgagaagatcaagttcctgcagagctaccctggccggggcagcggcagtgatgacacggagctgcggtactcgtcccagtacgaggagcgcctggaccccttctcctccttcagcaagcgggagcggcagaggaagtacctgagcttgagtccctgggacaaggccaccctcagcatggggcgtctggttctctccaacaagatggcgcgcaccatcggcttcttctacacactgttcctgcactgcctggtcttcctggtg

SEQ ID NO: 2279 - DNA, 1272 bp, Artificial
  cDNA Sequence
agattgatgcactgagtaaaagaagcaaggaagctgaagcagctttcttgaatgtctacaaaagattgattgacgtcccagatcccgtaccagctttggatctcggacagcaactccagctcaaagtgcagcgcctgcacgatattgaaacagagaaccagaaacttagggaaactctggaagaatacaacaaggaatttgctgaagtgaaaaatcaagaggttacgataaaagcacttaaagagaaaatccgagaatatgaacagacactgaagaaccaagccgaaaccatagctcttgagaaggaacagaagttacagaatgactttgcagaaaaggagagaaagctgcaggagacacagatgtccaccacctcaaagctggaggaagctgagcataaggttcagagcctacaaacagccctggaaaaaactcgaacagaattatttgacctgaaaaccaaatacgatgaagaaactactgcaaaggccgacgagattgaaatgatcatgacggaccttgaaagggcaaaccagagggcagaggtggctcagagagaggcggagaccttaagggaacagctctcatcggccaatcactccctccagctggcctcacagatccagaaggcaccagacgtggagcaggccatagaggtgctgacccgctccagcctagaagttgagttggccgccaaggagcgggagatcgcacagctggtggaggacgtgcagagactccaggccagcctcaccaagctgcgggagaattcggccagccagatctcacagcttgagcagcagctgagcgccaaaaacagcacactcaaacaactggaagaaaaactcaaaggccaggctgactatgaagaggtgaagaaagagctgaacattctgaagtccatggagtttgcaccgtccgagggcgctgggacacaggatgcggccaagcccctggaggtgctgttgctggagaagaaccgctcgctgcagtccgagaacgccgcgctgcgcatctccaacagcgacctgagcggtccatacagcacaaactccatatcttcccaaagtccattacaacaaagcccagatgtcaatggcatggccccatcccccagccagtcagaaagtgctgggagcgtctccgagggcgaggagatggacactgcagaaatcgcccggcaggtcaaagagcagctgattaagcacaatatcggacaacgtattttcggacattatgtgttgggactgtctcaagggtccgtgagcgaga

SEQ ID NO: 2280 - DNA, 454 bp, Artificial
  cDNA Sequence
agggccgacgagattgaaatgatcatgacggaccttgaaagggcaaaccagagggcagaggtggctcagagagaggcggagaccttaagggaacagctctcatcggccaatcactccctccagctggcctcacagatccagaaggcaccagacgtggagcaggccatagaggtgctgacccgctccagcctagaagttgagttggccgccaaggagcgggagatcgcacagctggtggaggacgtgcagagactccaggccagcctcaccaagctgcgggagaattcggccagccagatctcacagcttgagcagcagctgagcgccaaaaacagcacactcaaacaactggaagaaaaactcaaaggccaggctgactatgaagaggtgaagaaagagctgaacattctgaagtccatggagtttgcaccgtccgagggcgctgggacacagg

SEQ ID NO: 2281 - DNA, 1591 bp, Artificial
  cDNA Sequence
catgctgaaagggaatattccgtgcccattgtgcggaggcacctcctcatcgcttcctgtcacctgcagggtgccgctgagcaccgcctggagaagatcccagagcccatcaaagaggccactgccctattctacggacctgcagcaccagccagcggtgccctcccagagggccaggtggattcactgctttccatcatctccagccagagggagcgcttccgtgcccggaaccaggagcttgaggccgagaaccgcctggcccagcacaccctccaggccctgcagagtgagctggacagcctgcgcgccgacaacatcaagctctttgagaagatcaagttcctgcagagctaccctggccggggcagcggcagtgatgacacggagctgcggtactcgtcccagtacgaggagcgcctggaccccttctcctccttcagcaagcgggagcggcagaggaagtacctgagcttgagtccctgggacaaggccaccctcagcatggggcgtctggttctctccaacaagatggcgcgcaccatcggcttcttctacacactgttcctgcactgcctggtcttcctggtgctctacaagctggcatggagcgagagcatggagagggactgtgccaccttctgcgccaagaagttcgctgaccacctgcacaagttccacgagaatgacaacggggctgcggctggtgacttgtggcagtgataccccggggcctcccccgtgacagtgacggctgcgcctccaccccgactgctcagtgcatctaatcacttagactcccctgaagaatcccccatggaaactgcccttatccgctgtccagcagctgccagaggccccaggtcacctcgggtccccttgaaagaatgtctcggtcacatcaggcccgctaggtccagagagcgagcccccaatgcccggccaggctaagccgcagagaccctctcagcccccacctcaggttagggctctgcccgcagcctgacctctagccctggtggcagaggtccctcagctgcgaggctaattgggtgaccaccgattccagctgcggttaatccagcttgggcctgtctgcactgcgatcctcttgggctctcctaggatccccccatgccccgtaagaggtggaagacgcttccttccaggacagcaggctttgagtccagcacccccagcctgcctttgccaccagccccaccctgcagagtatatgaggcttgacagagtctgccccctcccccactgcaccccaagagagagagccccagccagcggaacagtttctattaccccctccctgcccccagacccatgtgatttctgctttcttctttagcaagatattctggtttctagataaggaagagtctctaatgagcccccgagccccagtctcttcagactcatggattggtctgaggggtctgaacgtctcctagccaatcagaactggctgtggaccaccctagcacggccacctctcagggccactggcaggccttcctgagttagatttgtagttgcatatttagctttgcacatttgaaataaaccacggttgcagcca

SEQ ID NO: 2282 - DNA, 591 bp, Artificial
  cDNA Sequence
catgctgaaagggaatattccgtgcccattgtgcggaggcacctcctcatcgcttcctgtcacctgcagggtgccgctgagcaccgcctggagaagatcccagagcccatcaaagaggccactgccctattctacggacctgcagcaccagccagcggtgccctcccagagggccaggtggattcactgctttccatcatctccagccagagggagcgcttccgtgcccggaaccaggagcttgaggccgagaaccgcctggcccagcacaccctccaggccctgcagagtgagctggacagcctgcgcgccgacaacatcaagctctttgagaagatcaagttcctgcagagctaccctggccggggcagcggcagtgatgacacggagctgcggtactcgtcccagtacgaggagcgcctggaccccttctcctccttcagcaagcgggagcggcagaggaagtacctgagcttgagtccctgggacaaggccaccctcagcatggggcgtctggttctctccaacaagatggcgcgcaccatcggcttcttctacacactgttcctgcactgcctggtcttcctggtg

SEQ ID NO: 2283 - DNA, 514 bp, Artificial
  cDNA Sequence
catgctgaaagggaatattccgtgcccattgtgcggaggcacctcctcatcgcttcctgtcacctgcagggtgccgctgagcaccgcctggagaagatcccagagcccatcaaagaggccactgccctattctacggacctgcagcaccagccagcggtgccctcccagagggccaggtggattcactgctttccatcatctccagccagagggagcgcttccgtgcccggaaccaggagcttgaggccgagaaccgcctggcccagcacaccctccaggccctgcagagtgagctggacagcctgcgcgccgacaacatcaagctctttgagaagatcaagttcctgcagagctaccctggccggggcagcggcagtgatgacacggagctgcggtactcgtcccagtacgaggagcgcctggaccccttctcctccttcagcaagcgggagcggcagaggaagtacctgagcttgagtccctgggacaaggccaccctcagcatggtgagtc

SEQ ID NO: 2284 - DNA, 1007 bp, Artificial
  cDNA Sequence
ccaggtgctctacaagctggcatggagcgagagcatggagagggactgtgccaccttctgcgccaagaagttcgctgaccacctgcacaagttccacgagaatgacaacggggctgcggctggtgacttgtggcagtgataccccggggcctcccccgtgacagtgacggctgcgcctccaccccgactgctcagtgcatctaatcacttagactcccctgaagaatcccccatggaaactgcccttatccgctgtccagcagctgccagaggccccaggtcacctcgggtccccttgaaagaatgtctcggtcacatcaggcccgctaggtccagagagcgagcccccaatgcccggccaggctaagccgcagagaccctctcagcccccacctcaggttagggctctgcccgcagcctgacctctagccctggtggcagaggtccctcagctgcgaggctaattgggtgaccaccgattccagctgcggttaatccagcttgggcctgtctgcactgcgatcctcttgggctctcctaggatccccccatgccccgtaagaggtggaagacgcttccttccaggacagcaggctttgagtccagcacccccagcctgcctttgccaccagccccaccctgcagagtatatgaggcttgacagagtctgccccctcccccactgcaccccaagagagagagccccagccagcggaacagtttctattaccccctccctgcccccagacccatgtgatttctgctttcttctttagcaagatattctggtttctagataaggaagagtctctaatgagcccccgagccccagtctcttcagactcatggattggtctgaggggtctgaacgtctcctagccaatcagaactggctgtggaccaccctagcacggccacctctcagggccactggcaggccttcctgagttagatttgtagttgcatatttagctttgcacatttgaaataaaccacggttgcagcca

SEQ ID NO: 2285 - DNA, 699 bp, Artificial
  cDNA Sequence
tatattttatatacttggttccattttgatagatatttgggttgcttccttgaagaatgttgtgcgtacaccgtttgacacaggtgcaagcttatctgcagggggaagccgatttgcaggactcattcctatagggagaggggccaggcccagggacttaagtgtttgtgaatttgtaggaactgccagattacccacacttagcagtttacaccccttccctccagcactggctgcagagagccctgtcctccagggccctaatgctaattctttcatgattgcactaattatatgcacaaaaggaatgcaacagaacaaaacaaaccacctggttttgtaggtgtggaagtgcacattgcagtaaggagtcaatgaaatcggttactgggtgggtccttttagagaccaacctcgcagttagccagcaacaggctgcagcttagctagatgaaaagttagtttgagaaactgaagtcattgccgctaaggctggcaaggtgtggctggggccaagttgggggaatgtcgtagtagccggccctgtgcgcctgagcccacaattactgcgtcgctgctggggtctggcaaagctcaccttgatgcagttttgttcaaagcagtgcaatttccaagcctcaaaacagatccttttcaatacaatgtgattgtaaaaattctattaataaagagaaaaaa

SEQ ID NO: 2286 - DNA, 447 bp, Artificial
  cDNA Sequence
ccatggaataaactgactgttcgtggcaaggagccatttcacaagatgaaacagttcctctccgatgagcagaacatcctggccctccgtagcatccaaggcagacaaagagagaatccaggccagagcctgaacagactatttcaggaagtaccgaaacgaagaaatgggtctgaaggtaacatcaccacccggatccgagcctcggagactggctctgatgaagccatcaagtccatcctagagcaagccaagagggagctccaagtgcagaaaactgcagagccggcccagccttcctccgcatccggcagcgggaactctgatgacgccatccgctccatcctgcagcaagcccgccgggagatggaggcccagcaggctgccctcgaccctgccttaaagcaggcaccactgtcccagagtgacatcaccatcctcaccccc

SEQ ID NO: 2287 - DNA, 1129 bp, Artificial
  cDNA Sequence
ctccacccccacagccacttccacatctccatcagttcctccttgtgggtccgaggcgctctgccgccggcccctcctcacttcttcctccctggggatggatccaagctattgtcctgcccatggcttcccatctcaggacgctctctggccgctatcatcccagcagtggagttcagcccactactctgaaccagccgcaggtggctgcgatgggacggaagccatgaatggtgccggccctggccccgccgcagccgccccggtcccagtcccggtcccggtcccggactggcggcagttctgcgagctgcatgcgcaggcggccgccgtggactttgcgcacaagttctgccgtttcctgcgggacaacccagcttacgacacgcccgacgccggcgcctccttctcccgccacttcgccgccaacttcctggacgtcttcggcgaggaggtgcgccgcgtgctggtggctgggccgacgactcggggcgcggccgtgagcgcagaggccatggagccggagctcgcggacacctctgcactcaaggcggcgccctacggccactcgcggagctcggaggacgtgtccacgcacgcggccaccaaggcccgcgttcgcaagggcttctcgctgcgcaacatgagcctgtgcgtggtggacggcgtgcgcgacatgtggcaccggcgcgcctcgcccgagcccgacgcggcagctgccccgcgcaccgccgagccccgcgacaagtggacgcggcgcctgaggctgtcgcggacgctggctgccaaggtggagctggtggacattcaacgcgagggggcgctgcgcttcatggtggccgacgacgcggccgcgggctccgggggctcggctcagtggcagaagtgccgcctgctcctgcgcagggctgtggccgaggaacgcttccgcctggagttcttcgtgccgcccaaagcctccaggcccaaggtcagcatcccactgtcagccatcattgaggtccgcaccaccatgcccctggaaatgccagagaaggataacacattcgtcctcaaggtagagaatggagccgaatacatcttggagaccatcgactctctgcagaagcactcgtgggtagctgacatc

SEQ ID NO: 2288 - DNA, 802 bp, Artificial
  cDNA Sequence
tccccacctcaggggaacagggtgcagagacggatcccgaggctgaacccgagctggagctatccgactacccatggttccacgggacactgtcccgggtcaaggctgctcaactggttctggcaggggggccccggaaccacggcctcttcgtgatccgccaaagtgagactcggcctggggagtacgtgctgaccttcaacttccagggcaaggccaaggcaacacctgcgcctgtccctgaacggccacggccagtgtcacgtacagcatctgtggttccagtctgtgcttgacatgctccgccacttccacacacaccccatcccactggagtcagggggctcggccgacatcacccttcgcagctatgtgcgggcccaggaccccccaccagagccgggccccacgccccctgccgcgcccgcgtccccggcctgctggagcgactcgcccggccagcactacttctccagcctcgccgcggccgcctgcccgcctgcctcgccctccgacgccgccggcgcctcctcgtcttccgcctcgtcgtcctctgccgcgtcggggcccgcccccccgcgccccgtcgagggccagctcagcgcgcggagccgcagcaacagcgccgagcgcctgctggaggccgtggccgccaccgccgccgaggagcccccggaggccgcgcccggccgcgcgcgcgccgtggagaaccagtactccttctactagcccgcggcgccgcccgggtgggacacgccaagctcttcagtgaagacacgatgttattaaaagcctgttttag

SEQ ID NO: 2289 - DNA, 1020 bp, Artificial
  cDNA Sequence
ctgccctggcttcctgcgcctcttcaggtcatcgcttgctctcgttcccaggctttggcctctagtggacgagaatcaccgagtctgcggggctggacgctgactgcccgggccagcacctaggcgggcgggagctgtgcggcccagggttcacgcgggccgggtagaggctcgagccgggacccccgagcgtgaaccccggagccggcggcgctggggccagaggggccgggcgggaggtggtggcggaggcgaaggggcgacgggacctgggcctggcccgtgtgtgtcctcggcggcctggcgccggccgtcgctgtacggtgagccccagggaggcggatctgggccccgagaaggacccccgcctggatttgccccgtaggcccggcccgggcccctcgggagcagaacagctttggtgaggtggacaggaggtgacctcgcgagcagacgcgcgcgccagcgacagcagcccgccccggcctctcgggagccgtggggcagaggctgcggagccccaggagggccggagccctcatgacttcagtgacctgcttctgcccctctaggtctatcagccacagtctctgcaagtttccaagagcagcagaaaatgaacacattgcaggggccagtgtcattcaaagatgtggctgtggatttcacccaggaggagtggcagcaactggaccctgatgagaagatagcatacggggatgtgatgttggagaactacagccatctagtttctgtggggtatgattatcaccaagccaaacatcatcatggagtggaggtgaaggaagtggagcagggagaggagccgtggataatggaaggtgaatttccatgtcaacatagtccagctttcacagcattgaaaagatcattggctggtggctctgactgtttccggctatgacgatgtaccactcgggaccctttctctggatgtttgccatctaatatgtataaaaagatcagaaatatgaaaaaaaggtaacaatgacattaaca

SEQ ID NO: 2290 - DNA, 946 bp, Artificial
  cDNA Sequence
ctgccctggcttcctgcgcctcttcaggtcatcgcttgctctcgttcccaggctttggcctctagtggacgagaatcaccgagtctgcggggctggacgctgactgcccgggccagcacctaggcgggcgggagctgtgcggcccagggttcacgcgggccgggtagaggctcgagccgggacccccgagcgtgaaccccggagccggcggcgctggggccagaggggccgggcgggaggtggtggcggaggcgaaggggcgacgggacctgggcctggcccgtgtgtgtcctcggcggcctggcgccggccgtcgctgtacggtgagccccagggaggcggatctgggccccgagaaggacccccgcctggatttgccccgtaggcccggcccgggcccctcgggagcagaacagctttggtgaggtggacaggaggtgacctcgcgagcagacgcgcgcgccagcgacagcagcccgccccggcctctcgggagccgtggggcagaggctgcggagccccaggagggccggagccctcatgacttcagtgacctgcttctgcccctctaggtctatcagccacagtctctgcaagtttccaagagcagcagaaaatgaacacattgcaggggccagtgtcattcaaagatgtggctgtggatttcacccaggaggagtggcagcaactggaccctgatgagaagatagcatacggggatgtgatgttggagaactacagccatctagtttctgtggggtatgattatcaccaagccaaacatcatcatggagtggaggtgaaggaagtggagcagggagaggagccgtggataatggaaggtgaatttccatgtcaacatagtccaggtaagttagtagattatcacatgttaaaaaacactcatccccgacctttgggagtgactaaagagttgtttatatgt

SEQ ID NO: 2291 - DNA, 493 bp, Artificial
  cDNA Sequence
gcccgtgtgtgtcctcggcggcctggcgccggccgtcgctgtacggtctatcagccacagtctctgcaagtttccaagagcagcagaaaatgaacacattgcaggggccagtgtcattcaaagatgtggctgtggatttcacccaggaggagtggcagcaactggaccctgatgagaagatagcatacggggatgtgatgttggagaactacagccatctagtttctgtggggtatgattatcaccaagccaaacatcatcatggagtggaggtgaaggaagtggagcagggagaggagccgtggataatggaaggtgaatttccatgtcaacatagtccagctttcacagcattgaaaagatcattggctggtggctctgactgtttccggctatgacgatgtaccactcgggaccctttctctggatgtttgccatctaatatgtataaaaagatcagaaatatgaaaaaaaggtaacaatgacattaaca

SEQ ID NO: 2292 - DNA, 830 bp, Artificial
  cDNA Sequence
ggaatgcaacagcgtggtctcggctcactgcaacttccacctcccaggttcaaaggattctcgtgcctcagcctcctgagtagctgggactacaggcatgtgacactatgcctggctaattttttttgttatttttaagtagagacggggttttgccatgttggcccaggcaggtggatcacttgaggccagaatttgagaccagcctggccaacatggcgaaaccctgtgtcactcttttagacccttctgagtgtttgcaggttgagtgttcacagggtgttagcctattgagctttcttttgtggttcttatgcaggtgatttctgcctttgcaggccggagccctcatgacttcagtgacctgcttctgcccctctaggtctatcagccacagtctctgcaagtttccaagagcagcagaaaatgaacacattgcaggggccagtgtcattcaaagatgtggctgtggatttcacccaggaggagtggcagcaactggaccctgatgagaagatagcatacggggatgtgatgttggagaactacagccatctagtttctgtggggtatgattatcaccaagccaaacatcatcatggagtggaggtgaaggaagtggagcagggagaggagccgtggataatggaaggtgaatttccatgtcaacatagtccagctttcacagcattgaaaagatcattggctggtggctctgactgtttccggctatgacgatgtaccactcgggaccctttctctggatgtttgccatctaatatgtataaaaagatcagaaatatgaaaaaaaggtaacaatgacattaaca

SEQ ID NO: 2293 - DNA, 756 bp, Artificial
  cDNA Sequence
ggaatgcaacagcgtggtctcggctcactgcaacttccacctcccaggttcaaaggattctcgtgcctcagcctcctgagtagctgggactacaggcatgtgacactatgcctggctaattttttttgttatttttaagtagagacggggttttgccatgttggcccaggcaggtggatcacttgaggccagaatttgagaccagcctggccaacatggcgaaaccctgtgtcactcttttagacccttctgagtgtttgcaggttgagtgttcacagggtgttagcctattgagctttcttttgtggttcttatgcaggtgatttctgcctttgcaggccggagccctcatgacttcagtgacctgcttctgcccctctaggtctatcagccacagtctctgcaagtttccaagagcagcagaaaatgaacacattgcaggggccagtgtcattcaaagatgtggctgtggatttcacccaggaggagtggcagcaactggaccctgatgagaagatagcatacggggatgtgatgttggagaactacagccatctagtttctgtggggtatgattatcaccaagccaaacatcatcatggagtggaggtgaaggaagtggagcagggagaggagccgtggataatggaaggtgaatttccatgtcaacatagtccaggtaagttagtagattatcacatgttaaaaaacactcatccccgacctttgggagtgactaaagagttgtttatatgt

SEQ ID NO: 2294 - DNA, 803 bp, Artificial
  cDNA Sequence
gtgaaactggaaggctgccatggctagcccagccgcctcctcggtgcgaccaccgaggcccaagaaagagccgcagacgctcgtcatccccaagaatgcggcggaggagcagaagctcaagctggagcggctcatgaagaacccggacaaagcagttccaattccagagaaaatgagtgaatgggcacctcgacctcccccagaatttgtccgagatgtcatgggttcaagtgctggggccggcagtggagagttccacgtgtacagacatctgcgccggagagaatatcagcgacaggactacatggatgccatggctgagaagcaaaaattggatgcagagtttcagaaaagactggaaaagaataaaattgctgcagaggagcagaccgcaaagcgccggaagaagcgccagaagttaaaagagaagaaattactggcaaagaagatgaaacttgaacagaagaaacaagaaggacccggtcagcccaaggagcaggggtccagcagctctgcggaggcatctggaacagaggaggaggaggaagtgcccagtttcaccatggggcgatgacaatgtttgccacagcctctgcctggaacctggctcgtgctgtgaccagaagggaaaggcggctgtttggctctttctcccccgcaaggacccgctgacccgctggatggagagcaaaggagacccctcccgagccgctcacagtcctgtatttggcaggtttgggagcctgaggggccatctccctgacactcagaggcactgccttgcagacaccatccgtgctcct

SEQ ID NO: 2295 - DNA, 951 bp, Artificial
  cDNA Sequence
cacaggccacgcggccacgcagtccgagcgggagccgagccgggcggggcgagggcagctccgggaaggaacgtcccagggatggaagtgcttggatgcggtgctgctggctgcggatgtgcgcaaggagatgggatggagagcctgagttggcattcgtataaatgacctgcctggctcccaccatgagtgctgagcttaacgtgcctatcgacccctctgctcctgcctgccctgagcccggccataagggcatggattaccgggactgggtccgccgcagctacctggaactggtcacctctaaccaccactcggtacaggccctgtcgtggcggaagctctacctgagcagggccaagctgaaggcctccagcaggacctccgccctcctctccggctttgccatggtggccatggtggaggtgcagctggagacgcagtaccagtacccgcggccgctgctgattgccttcagcgcctgcaccacggtgctggtggccgtgcacctgttcgccctcctcatcagcacctgcatcctgcccaatgtggaggccgtgagcaacatccacaacctgaactccatcagcgagtccccgcatgagcgcatgcacccctacatcgagctggcctggggcttctccaccgtgcttggcatcctactcttcctggccgaggtggtgctgctctgctggatcaagttcctccccgtggatgcccggcgccagcctggccccccacctggccctgggagtcacacgggctggcaggccgccctggtgtccaccatcatcatggtgcccgtgggcctcatcttcgtggtcttcaccatccacttctaccgctccctggtgcgccacaaaacggagcgccacaaccgcgagatcgaggagctccacaagctcaaggtccagctggacgggcatgagcgcagcctgcaggtcttgtgag

SEQ ID NO: 2296 - DNA, 898 bp, Artificial
  cDNA Sequence
tctccccaagggaaggaacgtcccagggatggaagtgcttggatgcggtgctgctggctgcggatgtgcgcaaggagatgggatggagagcctgagttggcattcgtataaatgacctgcctggctcccaccatgagtgctgagcttaacgtgcctatcgacccctctgctcctgcctgccctgagcccggccataagggcatggattaccgggactgggtccgccgcagctacctggaactggtcacctctaaccaccactcggtacaggccctgtcgtggcggaagctctacctgagcagggccaagctgaaggcctccagcaggacctccgccctcctctccggctttgccatggtggccatggtggaggtgcagctggagacgcagtaccagtacccgcggccgctgctgattgccttcagcgcctgcaccacggtgctggtggccgtgcacctgttcgccctcctcatcagcacctgcatcctgcccaatgtggaggccgtgagcaacatccacaacctgaactccatcagcgagtccccgcatgagcgcatgcacccctacatcgagctggcctggggcttctccaccgtgcttggcatcctactcttcctggccgaggtggtgctgctctgctggatcaagttcctccccgtggatgcccggcgccagcctggccccccacctggccctgggagtcacacgggctggcaggccgccctggtgtccaccatcatcatggtgcccgtgggcctcatcttcgtggtcttcaccatccacttctaccgctccctggtgcgccacaaaacggagcgccacaaccgcgagatcgaggagctccacaagctcaaggtccagctggacgggcatgagcgcagcctgcaggtcttgtgag

SEQ ID NO: 2297 - DNA, 1153 bp, Artificial
  cDNA Sequence
acgggctcgcgcggcgccgcctcctgggctcagttaccgcggacgccagtgccgggctccaggagacgcagggcgacgccacacgccggggtggccgactgggtcagcgcgggctgcgcctcctcgccatgggccccctctcggcgcggctgctaatgcagcgcgggcgccccaagagcgaccggctggggaagatccggagtctggacctgtcaggattggagctgctttccgagcacctggaccccaaactcctgtgccgcctgacgcagctgcaggagcttgacctgtctaacaaccacctggagacgctgccggacaacctgggcctgtcccacctgcgtgtcctccgctgcgccaacaaccagctgggggatgttactgccttgtgccagttccccaagctcgaggaactcagcctggagggcaaccccttcctgacggtaagtcaatgacaacctgaaagtctcctttctcctgcccacgctccgtaaggtcaatggcaaggatgcgtcctcaacttactctcaggtggagaacctgaatcgggagctgaccagcagggtcacagctcactgggagaagttcatggccacactgggtcctgaagaggaggctgagaaggcccaggcggactttgtgaagtcggctgtcagggatgtccgctacgggcccgagtccctcagcgagttcacccagtggcgggtgcggatgatctctgaggagctggtggccgccagtaggacccaggtgcaaaaggctaacagcccagagaagcccccagaagctggagctgcccacaagcccagggccagactggcggccttgaaacggccagacgacgtcccactcagcctctctcccagcaagcgggcgtgtgcctccccgtcggcccaggtggagggcagccctgtggcaggctccgatggcagccagcctgctgtgaagctggagcccctgcacttcctgcagtgccacagcaagaacaacagcccccaggacctcgagacccagctgtgggcctgtgccttcgagccggcctgggaggagggggccacatcccagaccgtggccacgtgcggcggggaggctgtgtgcgtaattgattgccagacgggcatcgtgctccacaagtacaaggcacccggcgagg

SEQ ID NO: 2298 - DNA, 2526 bp, Artificial
  cDNA Sequence
agcggatcatcctctgggacatcggggtgcccaaccaggactacgaattccaggccagccagctgctcacactggacaccacctctatccccctgcgcctctgccctgtcgcctcctgcccggacgcccgcctgctggccggctgcgagggcggctgctgctgctgggacgtgcggctggaccagccccaaaagaggagggtgtgtgaagtggaattcgtcttctctgagggctccgaggcatctggacggagagtggatgggctggcatttgtgaatgaggacatcgtggcctccaaggggagcggcctgggcaccatctgcctgtggagctggaggcagacgtgggggggccggggcagccagtccacggtggcagtggtggtcctggcgcggctgcaatggtcgtccaccgagttggcctacttctcgctcagcgcctgccctgataaggggattgtgctctgtggggatgaggagggcaacgtgtggctctacgacgtcagcaacatcctgaagcagccacccctgctgccggcagccctgcaggcccccacacagccctcccctctctccccaccagatcctgaagtggccccagccctgggcccttggccaggtggtgaccaagaccatggtgaacacagtggtggccaatgcctccttcacctacctcaccgccctgacggactccaacatcgtagccatctgggggaggatgtagcctcacaccatcgcaaaggaccagggacacagctaactaacttattcagctttgggccgatgggggtgggggggggtctttcagtgaatatttttattaaactctactgtggacaagaagcctgtggaaaggtgtttcgagttatgcaggaagaagtgttcctgctttgactgacaggcaggcccaggagttgaggcttctagagcagagactcttgggagctcatgggtttgcacacttctctccggctcagcacagcccccgcagcagcccctggaccccggatctttggtccagaatgaattcatccctgccagccggacgcccctgaaacaggtcatctgcctgcatcaagcctgacaatccatttgcttgcgaagtcaccgctgctcaagtccacatccaggtctctcccgctatactttattaggaatataaaacctaatctatgtacaggacacgtcggtgtcagggtgaggggtggccacaaggcgggccatggctgggaccggccgctctcctcggtgtggtacctggagcggagggtcaggcacaggtaggaacggggctcacaggccgagcagagccccctctggcccctactcaattccttcctgcttgtcttttatggccacctgggagagaagaaggtggtggagactgagctggaacagctggggcaaggacgctggaaacacatgcccagcatcccccccgccaggcccttcctggagggcagccatgggccacactccccaggacagtggagcagccaaagggccctcccagctggcccaatccagccattctctatggcagccccggcaggagtcagaggccccagaggcttcctggtgagcagacgactcagacgttgaaatcccccaagctgtggctctttcccctctaaactgttctagattcccatgcgccctgccaggaacaggtgtgggccacccgggggtgagctgcctcccagagacctggaaggaccaggccttgccaatcaccaacaagggacgtagaagagcacccccaaaggacagtaggtccccgccccgatctggcccacagcacccgagggaccctgcagcactacagaagtcccatggggcagacgggagccacaggcccagactccacagcccctcagtccacatgtcctggagcctgtggtggaagtccctgctcttccatcactgccgcctctcccccaggacctccgaagaaacaggccagggctgtcccaggcctgggcacacgggccagtgtccagcccaccccgtctgcccctccaggccccgccctcacccgaaagcgctcctccagcagggacagctcactgatgaggtcggtgatggcgttggtaaaggcttcctgggggctgtagtccggcgtggtctgcactcggatgatgatcttgtgctccaaggggtgggggactttgtagccagcaaatagcacttgcgggtcttttaggagttgtctgaggtcagggacagacagtgtgagggtctagcctcatgcccaagctgggtagcagccagctcagagcagaagaacagactttctagccaaaaatcccccccaacttttttcccaaaaagtcttcaaggaaagtaacacttttaggaagatacctcatgtggggacaccctatccccgccacacacacacactctgcatccatgaggttgaaggacccgagctggaaacagattccagcaacctcttcccaccgggcaccgcagtgctggcaaagagatctcccaggcagtgaatgtccagccagtgttcagtgac

SEQ ID NO: 2299 - DNA, 2504 bp, Artificial
  cDNA Sequence
agcggatcatcctctgggacatcggggtgcccaaccaggactacgaattccaggccagccagctgctcacactggacaccacctctatccccctgcgcctctgccctgtcgcctcctgcccggacgcccgcctgctggccggctgcgagggcggctgctgctgctgggacgtgcggctggaccagccccaaaagaggagggtgtgtgaagtggaattcgtcttctctgagggctccgaggcatctggacggagagtggatgggctggcatttgtgaatgaggacatcgtggcctccaaggggagcggcctgggcaccatctgcctgtggagctggaggcagacgtgggggggccggggcagccagtccacggtggcagtggtggtcctggcgcggctgcaatggtcgtccaccgagttggcctacttctcgctcagcgcctgccctgataaggggattgtgctctgtggggatgaggagggcaacgtgtggctctacgacgtcagcaacatcctgaagcagccacccctgctgccggcagccctgcaggcccccacacagatcctgaagtggccccagccctgggcccttggccaggtggtgaccaagaccatggtgaacacagtggtggccaatgcctccttcacctacctcaccgccctgacggactccaacatcgtagccatctgggggaggatgtagcctcacaccatcgcaaaggaccagggacacagctaactaacttattcagctttgggccgatgggggtgggggggggtctttcagtgaatatttttattaaactctactgtggacaagaagcctgtggaaaggtgtttcgagttatgcaggaagaagtgttcctgctttgactgacaggcaggcccaggagttgaggcttctagagcagagactcttgggagctcatgggtttgcacacttctctccggctcagcacagcccccgcagcagcccctggaccccggatctttggtccagaatgaattcatccctgccagccggacgcccctgaaacaggtcatctgcctgcatcaagcctgacaatccatttgcttgcgaagtcaccgctgctcaagtccacatccaggtctctcccgctatactttattaggaatataaaacctaatctatgtacaggacacgtcggtgtcagggtgaggggtggccacaaggcgggccatggctgggaccggccgctctcctcggtgtggtacctggagcggagggtcaggcacaggtaggaacggggctcacaggccgagcagagccccctctggcccctactcaattccttcctgcttgtcttttatggccacctgggagagaagaaggtggtggagactgagctggaacagctggggcaaggacgctggaaacacatgcccagcatcccccccgccaggcccttcctggagggcagccatgggccacactccccaggacagtggagcagccaaagggccctcccagctggcccaatccagccattctctatggcagccccggcaggagtcagaggccccagaggcttcctggtgagcagacgactcagacgttgaaatcccccaagctgtggctctttcccctctaaactgttctagattcccatgcgccctgccaggaacaggtgtgggccacccgggggtgagctgcctcccagagacctggaaggaccaggccttgccaatcaccaacaagggacgtagaagagcacccccaaaggacagtaggtccccgccccgatctggcccacagcacccgagggaccctgcagcactacagaagtcccatggggcagacgggagccacaggcccagactccacagcccctcagtccacatgtcctggagcctgtggtggaagtccctgctcttccatcactgccgcctctcccccaggacctccgaagaaacaggccagggctgtcccaggcctgggcacacgggccagtgtccagcccaccccgtctgcccctccaggccccgccctcacccgaaagcgctcctccagcagggacagctcactgatgaggtcggtgatggcgttggtaaaggcttcctgggggctgtagtccggcgtggtctgcactcggatgatgatcttgtgctccaaggggtgggggactttgtagccagcaaatagcacttgcgggtcttttaggagttgtctgaggtcagggacagacagtgtgagggtctagcctcatgcccaagctgggtagcagccagctcagagcagaagaacagactttctagccaaaaatcccccccaacttttttcccaaaaagtcttcaaggaaagtaacacttttaggaagatacctcatgtggggacaccctatccccgccacacacacacactctgcatccatgaggttgaaggacccgagctggaaacagattccagcaacctcttcccaccgggcaccgcagtgctggcaaagagatctcccaggcagtgaatgtccagccagtgttcagtgac

SEQ ID NO: 2300 - DNA, 462 bp, Artificial
  cDNA Sequence
gcggagcaaacatcaacagctggtggtttaactgacgctgctgcactggataccccaccccggtgccgggcacataggtgcagcctgagagtaagcagacccgggttggaaggtcccgcgattcaccaccgacaggatgggcggccttggcaacccccgacccctcgcaggcctgttcccttatccatgagatggagctcggacaaggtggccacaggaaggctttgcaaactgtgaagtgcagtgcctacgtgggcgtgccagtggcctcgccggagccggtagggaacactctgcagtccaggccagggccccggtaggacacccagctgtgcatcccgcccgtggccgcaaggcccgcaccttggccaacaggagcagggtgcggctggtgcgggcgtccgcgtggcgctcccgcaggtggaagagcttgggcgacatgatggcgggagagaagaagcg

SEQ ID NO: 2301 - DNA, 722 bp, Artificial
  cDNA Sequence
ggtggactgaggaaggcagggccatgggcttggaggcgggacacgcgtcagtagcaggtggcggcggggctatggagctcaaggatggagcaaatgtcaacaggcgcagatgatgggggggtttaactgacgctgctgcactggataccccaccccggtgccgggcacataggtgcagcctgagagtaagcagacccgggttggaaggtcccgcgattcaccaccgacaggatgggcggccttggcaacccccgacccctcgcaggcctgttcccttatccatgagatggagctcggacaaggtggccacaggaaggctttgcaaactgtgaagtgcagtgcctacgtgggcgtgccagtggcctcgccggagccggtagggaacactctgcagtccaggccagggccccggtaggacacccagctgtgcatcccgcccgtggccgcaaggcccgcaccttggccaacaggagcagggtgcggctggtgcgggcgtccgcgtggcgctcccgcaggtggaagagcttgggcgacatgatggcgggagagaagaagcgcaggcacaggaagctggtgacggcgatgaacggtacattctggaggggtgcggaagagcgcgggctggagtcccccagaccagggctcctggcagccccctccccttaggctccgtccctgaccctcgctgggacacagcctccctggtcctccccagcgctccc

SEQ ID NO: 2302 - DNA, 547 bp, Artificial
  cDNA Sequence
tgatgaagtccttcagctgcgccacgccctggcgcacggtgggctgcagcggctccatccaagcctccttggccctggaagccggcgtgtccatgttgcccacgttctggactgcctggaggtgacagcaggaaggaccaggttctgctaggtttaactgacgctgctgcactggataccccaccccggtgccgggcacataggtgcagcctgagagtaagcagacccgggttggaaggtcccgcgattcaccaccgacaggatgggcggccttggcaacccccgacccctcgcaggcctgttcccttatccatgagatggagctcggacaaggtggccacaggaaggctttgcaaactgtgaagtgcagtgcctacgtgggcgtgccagtggcctcgccggagccggtagggaacactctgcagtccaggccagggccccggtaggacacccagctgtgcatcccgcccgtggccgcaaggcccgcaccttggccaacaggagcagggtgcggctggtgcgggcgtccgcgtggcgctcccgcagg

SEQ ID NO: 2303 - DNA, 539 bp, Artificial
  cDNA Sequence
tccttcagctgcgccacgccctggtgcacggtgggctgcagcggctccatccaagcctccttggccctggaagccggcgtgtccatgttgcccacgttctggactgcctggaggtgacagcaggaaggaccaggttctgctaggtttaactgacgctgctgcaccggataccccaccccggtgccgggcacataggtgcagcctgagagtaagcagacccgggttggaaggtcccgcgattcaccaccgacaggatgggcggccttggcaacccccgacccctcgcaggcctgttcccttatccatgagatggagctcggacaaggtggccacaggaaggctttgcaaactgtgaagtgcagtgcctacgtgggcgtgccagtggcctcgccggagccggtagggaacactctgcagtccaggccagggccccggtaggacacccagctgtgcatcccgcccgtggccgcaaggcccgcaccttggccaacaggagcagggtgcggctggtgcgggcgtccgcgtggcgctcccgcagg

SEQ ID NO: 2304 - DNA, 2152 bp, Artificial
  cDNA Sequence
ttttgtatttgtattagagacggggtttcgccatgttggccaggctggtcttgaactcctgacctcaggtgatccacccgccttggcatcccaaaatgctgggattataggcatagccaccatgcccggttgacttctagagtttcaataacagagatgtgattcaagaagggagacatgttttgtagatggcaggagcttcatgaaaagaagccaatgaagggcaggacgtgtagctgtctacctacaggaaaccagccaggagcctccccacagggacttcagcacagatggccgggaaaatctgcattcacctgagctctggacctaagagaggacaaggccttgaccatttctacagactcacaagatgcaatctctgtggtccatgcccgtggtgtgatctgggaagcagggggccttctaaatgccaacaacaaggaaatcaaatgtgcaacaaacagaaataacggcattgacgtgggccatggaaaggcctaaacagatgactgcagttcactgccaaggtcatcaaaggggtgactctgaaataataaatttcagacgccacggcccaaatagctgcatgaggtggggaagtcctccacatgcctctgcttccttcggtacctgtttatgaaatcagccgaggtacttccctggggaatttcctttctttctttctttctttcgagacggagtcttgctctgtcgcccaggctagagtgcagtggtgcaatctcggctcactgcaacctctccctcctgggttttagcaattctcctgcatcagacttctgagtagctgagattacaggtgcatgccaccatgcccagctaatatttgtagttttagtagagacagggtttcaccatctaggccaggctggtcttgaactcctgacctcgtgatccacccgtcttggcctcccaaagtgctgggattacaggtgtgagccatcaagcccggactttttttttattttttgagacgacgtttcactcttgttgcccacgctggagtgcaatggcacgatctcagctcactgccacctcctcctcccaggttcaagcgattatcctgcctcagcctctcgagtagctgggattacaggcacccaacaccaaacccagctaacttattgtatttttagtagagatgggatgtcaccatgttggccaggatggtcttgaacccctgacctctaacgatccacctgaattggtttcccaaaatgttgggattacaggcacaagccactgcgcccagcccctcccatacctcttttggccaaggcagcacaattcagaagaatcttgccagggaagactggtaaatggacgtcaacgtgatgcctatggctcctggtggatttagatacctcctggtgcttattgatatctttaccagttgcacaggggcttttccatgccagactgaaaacgcagaagatcaatgatcaaccttcaactatttactagcagaacactgaggggactgtgcggtcaccaatacctcctattgcacttggataaacacctcccaggaaatagagatgaatagaaaggacatagtcaaacaagcagaatggctgcattccttcaaccagaagggtccattagtctgttttcacactgctataaagaactatgagaaactgggtaatttatgaagaaaagaggtttaattgactcacagttctgcaggctgtacaggaagcgtggctggggaggcctcaggaaactgacaatcacggcagaaggcgaaggggaagcaggcacgtctggccatgttggagcaggagagacagagagagtgaagtgggagggctgcacgcttttaaacaaccagatcccacaagcgctcactcaatatcacgagaacagcaagggggaagtcggcccccatgagccaatcacctcccaccaggtccctcccacaacactgggaattacaatttgacatgacatttgggtgtggatacagagctgaaccatgtcaagggtagttcaaccgctgagattgattgattgattgattgactgagatggagtcctgctctgttacctaggctggagtgcatgtgtggtcttctttgttgatggtgaataagcaggccttgggtaccttggtgtccttgttaatggtgat

SEQ ID NO: 2305 - DNA, 462 bp, Artificial
  cDNA Sequence
gcggagcaaacatcaacagctggtggtttaactgacgctgctgcactggataccccaccccggtgccgggcacataggtgcagcctgagagtaagcagacccgggttggaaggtcccgcgattcaccaccgacaggatgggcggccttggcaacccccgacccctcgcaggcctgttcccttatccatgagatggagctcggacaaggtggccacaggaaggctttgcaaactgtgaagtgcagtgcctacgtgggcgtgccagtggcctcgccggagccggtagggaacactctgcagtccaggccagggccccggtaggacacccagctgtgcatcccgcccgtggccgcaaggcccgcaccttagccaacaggagcagggtgcggctggtgcgggcgtccgcgtggcgctcccgcaggtggaagagcttgggcgacatgatggcgggggagaagaagcg

SEQ ID NO: 2306 - DNA, 547 bp, Artificial
  cDNA Sequence
tgatgaagtccttcagctgcgccacgccctggcgcacggtgggctgcagcggctccatccaagcctccttggccctggaagccggcgtgtccatgttgcccacgttctggactgcctggaggtgacagcaggaaggaccaggttctgctaggtttaactgacgctgctgcactggataccccaccccggtgccgggcacataggtgcagcctgagagtaagcagacccgggttggaaggtcccgcgattcaccaccgacaggatgggcggccttggcaacccccgacccctcgcaggcctgttcccttatccatgagatggagctcggacaaggtggccacaggaaggctttgcaaactgtgaagtgcagtgcctacgtgggcgtgccagtggcctcgccggagccggtagggaacactctgcagtccaggccagggccccggtaggacacccagctgtgcatcccgcccgtggccgcaaggcccgcaccttagccaacaggagcagggtgcggctggtgcgggcgtccgcgtggcgctcccgcagg

SEQ ID NO: 2307 - DNA, 788 bp, Artificial
  cDNA Sequence
gggtggacttaggcaaggggtccaggtcagagtttagagctttcaaatcccaacttgcccctggggattgcgcggctgatgtttagaacgcctagtcaagccaaccggctcgctcttgtttcagcaaaccctgacttacgtctcctatttgacttgaggcggcacagtggccaagtcgattggccgtggcaagtgaccctccctgtggctgaagtgttctgaggactggcgagagaggcgcgccatgcttgccccctgctcaggttgggagcttggctgcttccgtctctgtctccgtcaggtccgactgtgggctggcgctgggcgctgggcttgctgggcttgccaagccaggccgtacagctcaggtgggagcgagcgctggcccggatcggagactgaggtccctccgcctggcccggcgcgccgaactctgaaggagtggacactgcaggtttagatatcaagtcatcagggtctggctgtgtaaaagttcaaagtattgagggtgataattgcaaaattgaaacagagcatgggactagtatcttgcagtctgttaagggtcaaaaattgcatgttcaaacaaaaggaggcaaagtgatctgtctgggaacagtttatggaaatatagatattcatgcatcagataaaagctgtgaccatagataaactgcagggaagttctgttactgtatctaccgaagatggtttgctgaaagccaagtatctttatacagaatcatcatttctgtcttctgctgctggggatattacattaggaagtg

SEQ ID NO: 2308 - DNA, 935 bp, Artificial
  cDNA Sequence
cttaggcaaggggtccaggtcagagtttagagctttcaaatcccaacttgcccctggggattgcgcggctgatgtttagaacgcctagtcaagccaaccggctcgctcttgtttcagcaaaccctgacttacgtctcctatttgacttgaggcggcacagtggccaagtcgattggccgtggcaagtgaccctccctgtggctgaagtgttctgaggactggcgagagaggcgcgccatgcttgccccctgctcaggttgggagcttggctgcttccgtctctgtctccgtcaggtccgactgtgggctggcgctgggcgctgggcttgctgggcttgccaagccaggccgtacagctcaggtgggagcgagcgctggcccggatcggagactgaggtccctccgcctggcccggcgcgccgaactctgaaggagtggacactgcaggtgagcccgtttggtcggctgcgggcgcggctcccgtgccacctggccgtgaggcccctggaccccctcacctacccggatggcgaccgcgtgctggtcgcggtgtgcggcgtggagggcggcgtgcggggcctggacggcctgcaggtgaagtacgacgaggatctggaggagatggccattgtgtctgatactatccacccccaggcgtccgtggaggtttagatatcaagtcatcagggtctggctgtgtaaaagttcaaagtattgagggtgataattgcaaaattgaaacagagcatgggactagtatcttgcagtctgttaaggtaatataacattacaaagcaagatgggtaacatcacagtagattcgtcttctggatgtctaaaagcctcaactaatcagggtgccatagatgtttatgtcagccaactggggaaagtggaattgaaatcccataaaggttctattattgtcaaggtcc

SEQ ID NO: 2309 - DNA, 482 bp, Artificial
  cDNA Sequence
aggttctattattgtcaaggtcccatcttcacttcaagctcatttacagttatcagggaaagaggttgatgtgaactcagaagtccatgttcaggaaatggctgaagttcgtaaagatgatgttgtaacagtgactggactcatgaatcaagcaagcaaacgtgaaaaatggattaaggctgatgccccaaaaggcactgtaagttttagaaggcaaagttggtttcagtccctgaaactgcaggactaaaactgatttgagttggatttatgatttttaacaatgattcgcagatctgtgactacaaaaatgtaaatcccaccattcatataaaggttgaaaacaacaaattgagaatgaatactggtgaactgttttgggaggctttttcaaaatttgtgctttgctattgtattcattttctactgctctgtaacaaattaccacaaatttagcagcataaaataatactcatttacag

SEQ ID NO: 2310 - DNA, 720 bp, Artificial
  cDNA Sequence
gaagaccacacactgggaaacatcattaaatcacaactcctaaaagacccgcaagtgctatttgctggctacaaagtcccccaccccttggagcacaagatcatcatccgagtgcagaccacgccggactacagcccccaggaagcctttaccaacgccatcaccgacctcatcagtgagctgtccctgctggaggagcgctttcgggtggccataaaagacaagcaggaaggaattgagtaggggccagagggggctctgctcggcctgtgagccccgttcctacctgtgcctgaccctccgctccaggtaccacaccgaggagagcggccggtcccagccatggcccgccttgtggccacccctcaccctgacaccgacgtgtcctgtacatagattaggttttatattcctaataaagtatagcgggagagacctggatgtggacttgagcagcggtgacttcgcaagcaaatggattgtcaggcttgatgcaggcagatgacctgtttcaggggcgtccggctggcagggatgaattcattctggaccaaagatccggggtccaggggctgctgcgggggctgtgctgagccggagagaagtgtgcaaacccatgagctcccaagagtctctgctctagaagcctcaactcctgggcctgcctgtcagtcaaagcaggaacacttcttcctgcataactcgaaacacctttccaca

SEQ ID NO: 2311 - DNA, 792 bp, Artificial
  cDNA Sequence
agaggcctcttattagggctctggtggcggcggcggcggacccttggggtctggacgcaacggcggcgggagcatgaacgcccctccagccttcgagtcgttcttgctcttcgagggcgagaagaagatcaccattaacaaggacaccaaggtacccaatgcctgtttattcaccatcaacaaagaagaccacacactgggaaacatcattaaatcacaactcctaaaagacccgcaagtgctatttgctggctacaaagtcccccaccccttggagcacaagatcatcatccgagtgcagaccacgccggactacagcccccaggaagcctttaccaacgccatcaccgacctcatcagtgagctgtccctgctggaggagcgctttcgggtggccataaaagacaagcaggaaggaattgagtaggggccagagggggctctgctcggcctgtgagccccgttcctacctgtgcctgaccctccgctccaggtaccacaccgaggagagcggccggtcccagccatggcccgccttgtggccacccctcaccctgacaccgacgtgtcctgtacatagattaggttttatattcctaataaagtatagcgggagagacctggatgtggacttgagcagcggtgacttcgcaagcaaatggattgtcaggcttgatgcaggcagatgacctgtttcaggggcgtccggctggcagggatgaattcattctggaccaaagatccggggtccaggggctgctgcgggggctgtgctgagccggagagaagtgt

SEQ ID NO: 2312 - DNA, 1049 bp, Artificial
  cDNA Sequence
gggctctggtggcggcggtggcggacacttggggtctggacgcaacggcggcgggagcatgaacgcccctccagccttcgagtcgttcttgctcttcgagggcgagaaacgtgcctgcttccccttcgccttctgccgtgattgtcagtttcctgaggcctccccagccacgcttcctgtacagcctgcagaactgtgagtcaattaaacctcttttcttcataaattacccagtttctcatagttctttatagcagtgtgaaaacagactaatggacccttctggttgaaggaatgcagccattctgcttgtttgactatgtcctttctattcatctctatttcctgggaggtgtttatccaagtgcaataggaggtattggtgaccgcacagtcccctcagtgttctgctagtaaatagttgaaggttgatcattgatcttctgcgttttcagtctggcatggaaaagcccctgtgcaactggtaaagatatcaataagcaccaggaggtatctaaatccaccaggagccataggcatcacgttgacgtccatttaccagtcttccctggcaagattcttctgaattgtgctgccttggccaaaagaggaggaactaccctgccctgacagaggctggggatgaaggaggaagagacagccggtcccctggataaagagcacagactacagacaggggagcctctggggctgcagacactgcagacggacggacagacagatggacaacagctggaggcttggcccggccatagggctctctgcgggacagtcccagctgctagtgtcgctgttgctgctactgacccgtgtccagcctgggacagacgtggctgccccagagcacatcagctatgtgccccagctctcaaacgacaccttggcggggaggctcaccctgtccaccttcacgctggagcagcctctaggccagttcagcagccacaacatctctgacttggataccatctggctggtggtggccctcagcaacgccacccagagcttcacggccccacggacaaacc

SEQ ID NO: 2313 - DNA, 698 bp, Artificial
  cDNA Sequence
ggcggcggtggcggacacttggggtctggacgcaacggcggcgggagcatgaacgcccctccagccttcgagtcgttcttgctcttcgagggcgagaagatcaccattaacaaggacaccaaggtacccaaggcctgcttattcaccatcaacaaagaagaccacacactgggaaacatcattaaatcacaactcctaaaagacccgcaagtgctatttgctggctacaaagtcccccaccccttggagcacaagatcatcatccgagtgcagaccacgccggactacagcccccaggaagcctttaccaacgccatcaccgacctcatcagtgagctgtccctgctggaggagcgcttccgggtgagggcggggcctggaggggcagacggggtgggctggacactggcccgtgtgcccaggcctgggacagccctggcctgtttcttcggaggtcctcagggagaggcggcggtgatggaagaacagggacttccaccacaggctccaggacatgtggactgaggggctgtggagtctgggcctgtggctcccgtctgccccatgggacttctgtagtgctgcagggtccctcgggtgctgtgggccagatccgggcggggacctactgtcctttgggggtgctcttctacgtcccttgtcggtgattggcaaggcctggtccttccaggcctctg

SEQ ID NO: 2314 - DNA, 223 bp, Artificial
  cDNA Sequence
cgcaacggcggcgggagcatgaacgcccctccagccttcgagtcgttcttgctcttcgagggcgagaagatcaccattaacaaggacaccaaggtacccaatgcctgtttattcaccatcaacaaagaagaccacacactgggaaacatcattaaatcacaactcctaaaagacccgcaagtgctatttgctggctacaaagtcccccaccccttggagcaca

SEQ ID NO: 2315 - DNA, 453 bp, Artificial
  cDNA Sequence
ttattcaccatcaacaaagaagaccacacactgggaaacatcattaaatcacaactcctaaaagacccgcaagtgctatttgctggctacaaagtcccccaccccttggagcacaagatcatcatccgagtgcagaccacgccggactacagcccccaggaagcctttaccaacgccatcaccgacctcatcagtgagctgtccctgctggaggagcgctttcgggtggccataaaagacaagcaggaaggaattgagtaggggccagagggggctctgctcggcctgtgagccccgttcctacctgtgcctgaccctccgctccaggtaccacaccgaggagagcggccggtcccagccatggcccgccttgtggccacccctcaccctgacaccgacgtgtcctgtacatagattaggttttatattcctaataaagtatagcgggagaga

SEQ ID NO: 2316 - DNA, 1085 bp, Artificial
  cDNA Sequence
taggcatcacgttgacgtccatttaccagtcttccctggcaagattcttctgaattgtgctgccttggccaaaagaggaggaactaccctgccctgacagaggctggggatgaaggaggaagagacagccggtcccctggataaagagcacagactacagacaggggagcctctggggctgcagacactgcagacggacggacagacagatggacaacagctggaggcttggcccggccatagggctctctgcgggacagtcccagctgctagtgtcgctgttgctgctactgacccgtgtccagcctgggacagacgtggctgccccagagcacatcagctatgtgccccagctctcaaacgacaccttggcggggaggctcaccctgtccaccttcacgctggagcagcctctaggccagttcagcagccacaacatctctgacttggataccatctggctggtggtggccctcagcaacgccacccagagcttcacggccccacggacaaaccaggacatccctgctcctgccaacttctcccagaggggctactatctcacactgagggccaaccgggtgctgtaccagaccagaggccagctccatgtcctccgcgtcggcaatgatacccactgccaaccaacaaaaattggctgcaaccatcccctaccaggacccggcccctacagggtgaagttcctggtgatgaatgacgaaggacccgtggctgaaaccaagtggtccagcgacactcgcctgcagcaagcccaggcacttcgggctgtccccggcccccagagcccgggcaccgtggtcatcatcgccatcctgtctatcctcctggccgtcctcctcacggtcctcctggctgtgctcatatacacctgcttcaacagctgcaggagcacttccctatcaggcccagaggaggcagggagtgtgagaagatacaccacgcacctcgcgttcagcactcctgccgagggggcttcctgaggggttccagaggggcccacgtgtccctccacctcctccctggcccaggctgcagagcctgagctgggacacgccctgaagctt

SEQ ID NO: 2317 - DNA, 1041 bp, Artificial
  cDNA Sequence
taggcatcacgttgacgtccatttaccagtcttccctggcaagattcttctgaattgtgctgccttggccaaaagaggaggaactaccctgccctgacagaggctggggatgaaggaggaagagacagccggtcccctggataaagagcacagactacagacaggggagcctctggggctgcagacactgcagacggacggacagacagatggacaacagctggaggcttggcccggccatagggctctctgcgggacagtcccagctgctagtgtcgctgttgctgctactgacccgtgtccagcctgggacagacgtggctgccccagagcacatcagctatgtgccccagctctcaaacgacaccttggcggggaggctcaccctgtccaccttcacgctggagcagcctctaggccagttcagcagccacaacatctctgacttggataccatctggctggtggtggccctcagcaacgccacccagagcttcacggccccacggacaaaccaggacatccctgctcctgccaacttctcccagaggggctactatctcacactgagggccaaccgggtgctgtaccagaccagaggccagctccatgtcctccgcgtcggcaatgatacccactgccaaccaacaaaaattggctgcaaccatcccctaccaggacccggcccctacagggtgaagttcctggtgatgaatgacgaaggacccgtggctgaaacaaagtggtccagcgacactcgcctgcagcaagcccaggcacttcgggctgtccccggcccccagagcccgggcaccgtggtcatcatcgccatcctgtctatcctcctggccgtcctcctcacggtcctcctggctgtgctcatatacacctgcttcaacagctgcaggagcacttccctatcaggcccagaggaggcagggagtgtgagaagatacaccacgcacctcgcgttcagcactcctgccgagggggcttcctgaggggttccagaggggcccacgtgtccctccacctcctccc

SEQ ID NO: 2318 - DNA, 248 bp, Artificial
  cDNA Sequence
ctcctggccgtcctcctcacggtcctcctggctgtgctcatatacacctgcttcaacagctgcaggagcacttccctatcaggcccagaggaggcagggagtgtgagaagatacaccacgcacctcgcgttcagcactcctgccgagggggcttcctgaggggttccagaggggcccacgtgtccctccacctcctccctggcccaggctgcagagcctgagctgggacacgccctgaagcttctgga

SEQ ID NO: 2319 - DNA, 682 bp, Artificial
  cDNA Sequence
acttggggtctggacgcaacggcggcgggagcatgaacgcccctccagccttcgagtcgttcttgctcttcgagggcgagaagatcaccattaacaaggacaccaaggtacccaatgcctgtttattcaccatgaacaaagaagaccacacactgggaaacatcattaaatcacaactcctaaaagacccgcaagtgctatttgctggctacaaagtcccccaccccttggagcacaagatcatcatccgagtgcagaccacgccggactacagcccccaggaagcctttaccaacgccatcaccgacctcatcagcgagctgtccctgctggaggagcgcttccgggtgagggcagggcctggaggggcagacggggtgggctggacactggcccgtgtgcccaggcctgggacagccctggcctgtttcttcggaggtcctcagggagaggcggcggtgatggaagaacagggacttccaccacaggctccaggacatgtggactgaggggctgtggagtctgggcctgtggctcccgtctgccccatgggacttctgtagtgctgcagggtccctcgggtgctgtgggccagatccgggcggggacctactgtcctttgggggtgctcttctacgtcccttgtcggtgattggcaaggcctggtccttccaggcctctg

SEQ ID NO: 2320 - DNA, 292 bp, Artificial
  cDNA Sequence
ttggagagggtggagctttagagtgagacccaggacgccaaatcccaaagagaaaaataggagcctaaataaggatcaggaccaagggaagggagtgaggctcagtgtcatcaaggaacagccaatccaatgagattgacatgagaaatgatacatattcagcagaagatcagaccctaaaagcatgacaattgcagttatcttctctggcaagagaagagtgtgaagatactcctaaatagccacatatggattaattttattttagaatcgtgaaaaatggaagacagta

SEQ ID NO: 2321 - DNA, 899 bp, Artificial
  cDNA Sequence
cgtggcgcagctgaaggacttcatcaccaagctcgtggacatcgaggagaaggacgagctggacctgcagcggacgctgagtttgcaggcgccacctgtgaaggaggggccactcttcatccacaggaccaagggcaagggccccctcatgtcctcctccttcaagaagctctacttctccctcactaccgaggccctcagcttcgcgaagacgcccagctccaagaaaagcgccctcatcaagttagccaacatccgggcagcggaaaaggttgaggaaaagagctttggcggctcgcacgtcatgcaggtcatctacacggacgacgccggcaggccccagactgcctacctgcagtgcaagtgtgtgaatgagcttaaccagtggctgtctgcgctgcggaaggtgagcatcaacaacaccggactgctgggctcctaccaccctggcgtcttccgtggggacaagtggagctgctgccaccaaaaagagaagacaggtcagggctgcgataagacccggtcacgggtgaccctgcaggagtggaatgaccctcttgaccatgaccttgaggcccagctcatctaccggcacctgctgggcgtggaggccatgctgtgggagaggcaccgggagctgagcgggggcgcagaggcaggcacggtgcccacgagccctggcaaagtccccgaggactcattggcccggctgctccgggtgctgcaggacctccgcgaggcccatagctccagcccggccggctccccaccctcagagcccaactgcctcctggagctgcagacgtgaggcccgccctacgctccccttgctgagtcccctgccaagcgctcggagcccccccaggacactctgcaccccctcaccccggtcctcctca

SEQ ID NO: 2322 - DNA, 626 bp, Artificial
  cDNA Sequence
cgtggcgcagctgaaggacttcatcaccaagctcgtggacatcgaggagaaggacgagctggacctgcagcggacgctgagtttgcaggcgccacctgtgaaggaggggccactcttcatccacaggaccaagggcaagggccccctcatgtcctcctccttcaagaagctctacttctccctcactaccgaggccctcagcttcgcgaagacgcccagctccaagaaaagcgccctcatcaagttagccaacatccgggcagcggaaaaggttgaggaaaagagctttggcggctcgcacgtcatgcaggtcatctacacggacgacgccggcaggccccagactgcctacctgcagtgcaagtgtgtgaatgagcttaaccagtggctgtctgcgctgcggaaggtgagcatcaacaacaccggactgctgggctcctaccaccctggcgtcttccgtggggacaagtggagctgctgccaccaaaaagagaagacaggtcagggctgcgataagacccggtcacgggtgaccctgcaggagtggaatgaccctcttgaccatgaccttgaggcccagctcatctaccggcacctgctgggcgtggaggccatgctgtggtgag

SEQ ID NO: 2323 - DNA, 450 bp, Artificial
  cDNA Sequence
gctgccaccaaaaagagaagacaggtcagggctgcgataagacccggtcacgggtgaccctgcaggagtggaatgaccctcttgaccatgaccttgaggcccagctcatctaccggcacctgctgggcgtggaggccatgctgtgggagaggcaccgggagctgagcgggggcgcagaggcaggcacggtgcccacgagccctggcaaagtccccgaggactcattggcccggctgctccgggtgctgcaggacctccgcgaggcccatagctccagcccggccggctccccaccctcagagcccaactgcctcctggagctgcagacgtgaggcccgccctacgctccccttgctgagtcccctgccaagcgctcggagcccccccaggacactctgcaccccctcaccccggtcctcctcattagggtgcagggcctaggtctcttcc

SEQ ID NO: 2324 - DNA, 491 bp, Artificial
  cDNA Sequence
gccgaggcagggcctgggtcagacttaccaggctatgctcccagcccagccctcactagggacccccgagtgcatctctctcctctccaggcctctgtttctccatctgtgcaaccacagtgttggacatggtagtcccaagtgtctgctcgtaactttgccctctctgtgcccccaggtcagggctgcgataagacccggtcacgggtgaccctgcaggagtggaatgaccctcttgaccatgaccttgaggcccagctcatctaccggcacctgctgggcgtggaggccatgctgtgggagaggcaccgggagctgagcgggggcgcagaggcaggcacggtgcccacgagccctggcaaagtccccgaggactcattggcccggctgctccgggtgctgcaggacctccgcgaggcccatagctccagcccggccggctccccaccctcagagcccaactgcctcctggagctgcagacgtgaggccc

SEQ ID NO: 2325 - DNA, 541 bp, Artificial
  cDNA Sequence
tgctcccagcccagccctcactagggacccccgagtgcatctctctcctctccaggcctctgtttctccatctgtgcaaccacagtgttggacatggtagtcccaagtggctgcgataagacccggtcacgggtgaccctgcaggagtggaatgaccctcttgaccatgaccttgaggcccagctcatctaccggcacctgctgggcgtggaggccatgctgtgggagaggcaccgggagctgagcgggggcgcagaggcaggcacggtgcccacgagccctggcaaagtccccgaggactcattggcccggctgctccgggtgctgcaggacctccgcgaggcccatagctccagcccggccggctccccaccctcagagcccaactgcctcctggagctgcagacgtgaggcccgccctacgctccccttgctgagtcccctgccaagcgctcggagcccccccaggacactctgcaccccctcaccccggtcctcctcattagggtgcagggcctaggtctcttccaggtgggggagg

SEQ ID NO: 2326 - DNA, 661 bp, Artificial
  cDNA Sequence
gggcgtggaggccatgctgtgggagaggcaccgggagctgagcgggggcgcagaggcaggcacggtgcccacgagccctggcaaagtccccgaggactcattggcccggctgctccgggtgctgcaggacctccgcgaggcccatagctccagcccggccggctccccaccctcagagcccaactgcctcctggagctgcagacgtgaggcccgccctacgctccccttgctgagtcccctgccaagcgctcggagcccccccaggacactctgcaccccctcaccccggtcctcctcattagggtgcagggcctaggtctcttccaggtgggggaggggggagagtcaggaataaggggatccccagaagtgcagagctgagcaggcttgggcctgtcatggctggccggaagtgtccccagctccctacagacgctgtagccatcactgcctctccagggaccctcctctcctgcccaggacagacccagccagaaccactgctaggatgggccgcacccaggggtctggcctccagggacctagagaatgggagggagaacggggccccaggagacccggccgccaccccacccgctacccttgggtgccacagggctgtgctgttgccaacagtaaacctgctcttactgtccaggc

SEQ ID NO: 2327 - DNA, 375 bp, Artificial
  cDNA Sequence
agtttgcaggcgccacctgtgaaggaggggccactcttcatccacaggaccaagggcaagggccccctcatgtcctcctccttcaagaagctctacttctccctcactaccgaggccctcagcttcgcgaagacgcccagctccaagtgtgtgaatgagcttaaccagtggctgtctgcgctgcggaaggtgagcatcaacaacaccggactgctgggctcctaccaccctggcgtcttccgtggggacaagtggagctgctgccaccaaaaagagaagacaggtcagggctgcgataagacccggtcacgggtgaccctgcaggagtggaatgaccctcttgaccatgaccttgaggcccagctcatctaccgg

SEQ ID NO: 2328 - DNA, 291 bp, Artificial
  cDNA Sequence
agctccttatctatgaagtggacaggacaccagcatctagtcctggagtccttggtgaggacctggtgtgttgaggctggccggtgcagagttaagggttcagtccatgatttctgcatccatgaaagggggatggtgaggctgggcatgcttgaattttctctttctgatttcctgtctctctgcctctgactatgtttctccatctgtttctctctgtctgtctgtctgtctttcagagcagggtctttctttctgacatctgcagggctgggggctgtgctaggaggg

SEQ ID NO: 2329 - DNA, 558 bp, Artificial
  cDNA Sequence
ccgccgcccgccaccccggaccccggtgtctggcttcccccgagccgggaccccgcgatggccaagcgcagctcgctgtacatccgcatcgtggaggggaagaaccttcccgccaaggacatcactggcagcagcgacccctactgcatcgtgaaggtggacaatgagcccatcatcaggacagccacagtgtggaagaccctgtgccccttctggggtgaggagtaccaagtgcacctgccgcccaccttccacgctgtggctttctatgtcatggatgaggatgccctcagccgggacgacgttatcggaaaggtctgccttacaagggacaccatagcctctcaccctaagggtaagttctcccttccctcccacactggtctgcccagtccctggcctccctcccactcggagacctcccctctaggctccgtctggtctcctgctcagggaaagccatttctactctccccagaagccggggccacgttctgtactcctggcctctgttctgcagcatgttcccaagcctggttgttactgcctcttccctag

SEQ ID NO: 2330 - DNA, 290 bp, Artificial
  cDNA Sequence
ttcggcaaacactcatgggctgcctgtcttgtgccaagccctgtgggggccctggggacacaggcatgctccccgcccccaggtagctcagagcaggtgggaggcagctgatcactaccaggctggatgaagtgggcaggcagtgtgagtccagggaggccttcctccccgtcccgtcctggggcgagggagggctctggcagggctgaaggccgactgggcaggagggacagcggagggcatagaaaggaggaacattctatcccctgcgggaggaacaggaggtttcc

SEQ ID NO: 2331 - DNA, 620 bp, Artificial
  cDNA Sequence
ctgaccccacaggtttcagcgggtgggcccacctgacggaggtcgaccccgatgaggaggtgcagggcgagatccacctgcggctggaagtgtggccaggggcccgggcctgccggctacgctgctctgtgctggaggccagggatctggccccaaaggaccgcaatggcacatctgaccccttcgtccgagtgcgctacaagggccggacacgggagacctcgatcgtgaagaagtcatgctacccacgctggaatgagacgtttgaatttgagctgcaggagggggccatggaggcgctgtgcgtggaggcctgggactgggaccttgtcagccgaaacgacttcctgggcaaagtggtgattgatgtccagagactgcgggtggtgcagcaggaggagggctggttccggctgcagcccgaccagtccaagagccggcggcatgacgagggcaacctgggctccttgcagctggaggtgcggctgcgggacgagacggtgctgccctccagctactaccagccactggtgcacctgctgtgccacgaggtcaagctgggcatgcagggcccagggcagctgatcccactcatcgaggagacaaccagcaccgagtgt

SEQ ID NO: 2332 - DNA, 293 bp, Artificial
  cDNA Sequence
gatcgtgaagaagtcatgctacccacgctggaatgagacgtttgaatttgagctgcaggagggggccatggaggcgctgtgcgtggaggcctgggactgggaccttgtcagccgaaacgacttcctgggcaaagtggtgattgatgtccagagactgcgggtggtgcagcaggaggagggctggttccggctgcagcccgaccagtccaagagccggcggcatgacgagggcaacctgggctccttgcagctggaggtgcggctgcgggacgagacggtgctgccctccagct

SEQ ID NO: 2333 - DNA, 451 bp, Artificial
  cDNA Sequence
gggactgggaccttgtcagccgaaacgacttcctgggcaaagtggtgattgatgtccagagactgcgggtggtgcagcaggaggagggctggttccggctgcagcccgaccagtccaagagccggcggcatgacgactggaggtgcggctgcgggacgagacggtgctgccctccagctactaccagccactggtgcacctgctgtgccacgaggtcaagctgggcatgcagggcccagggcagctgatcccactcatcgaggagacaaccagcaccgagtgtcgccaggacgtggccacgaacctgctcaagctcttcctggggcaggggctggccaaggacttcctggacctgctcttccagctggagctgagtcgcaccagtgagaccaacaccctgttccggagcaactctctggcctcaaagtccatggagtcttttctgaaggtg

SEQ ID NO: 2334 - DNA, 623 bp, Artificial
  cDNA Sequence
ctgaccccacaggtttcagcgggtgggcccacctgacagaggtcgaccccgacgaggaggtgcagggcgagatccacctgcggctggaagtgtggccaggggcccgggcctgccggctacgctgctctgtgctggaggccagggatctggccccaaaggaccgcaatggcacatctgaccccttcgtccgagtgcgctacaagggccggacacgggagacctcgatcgtgaagaagtcatgctacccacgctggaatgagacgtttgaatttgagctgcaggagggggccatggaggcgctgtgcgtggaggcctgggactgggaccttgtcagccgaaacgacttcctgggcaaagtggtgattgatgtccagagactgcgggtggtgcagcaggaggagggctggttccggctgcagcccgaccagtccaagagccggcggcatgacgagggcaacctgggctccttgcagctggaggtgcggctgcgggacgagacggtgctgccctccagctactaccagccactggtgcacctgctgtgccacgaggtcaagctgggcatgcagggcccagggcagctgatcccactcatcgaggagacaaccagcaccgagtgtcgc

SEQ ID NO: 2335 - DNA, 451 bp, Artificial
  cDNA Sequence
gggactgggaccttgtcagccgaaacgacttcctgggcaaagtggtgattgatgtccagagactgcgggtggtgcagcaggaggagggctggttccggctgcagcccgaccagtccaagagccggcggcatgacgactggaggtgcggctgcgggacgagacggtgctgccctccagctactaccagccactggtgcacctgctgtgccacgaggtcaagctgggcatgcagggcccagggcagctgatcccactcatcgaggagacaaccagcaccgagtgtcgccaggacgtggccacgaacctgctcaagctcttcctggggcaggggctggccaaggacttcctggacctgctcttccagctggagctgagtcgcaccagtgagaccaacaccctgttccggagcaactctctggcctcaaagtccgtggagtcttttctgaaggtg

SEQ ID NO: 2336 - DNA, 294 bp, Artificial
  cDNA Sequence
cgtggcgcagctgaaggacttcatcaccaagctcgtggacatcgaggagaaggacgagctggacctgcagcggacgctgagtttgcaggcgccacctgtgaaggaggggccactcttcatccacaggaccaagggcaagggccccctcatgtcctcctccttcaagaagctctacttctccctcactaccgaggccctcagcttcgcgaagacgcccagctccaagaaaagcgccctcatcaagttagccaacatccgggcagcggaaaaggttgaggaaaagagctttggcgg

SEQ ID NO: 2337 - DNA, 820 bp, Artificial
  cDNA Sequence
cccacggccgcgcctgcgcactggccacgcggacggcgcgatggcggcggctgccgccgagacccccgaagtccttcgggaatgcggttgcaagggcatccggacctgtctgatctgcgagcggcagcgcggcagtgacccgccctgggagctgcccccagcgaaaacataccgtttcatttactgctccgacaccggctgggccgtgggcacagaggagtctgactttgagggctgggccttccccttcccaggagtgatgctgatcgaggactttgtgacccgggaggaagaagccgagttggtgcggctcatggaccgtgacccctggaagctctcccagtctggacggaggaagcaggactatggccccaaagtcaactttcggaaacagaagctaaagaccgagggcttctgcggcctccccagcttcagccgggaggtggtgcggaggatgggcctctacccggggctggagggcttccggcccgtcgagcagtgcaacctggactactgccccgagcggggctctgccattgacccccacctggacgacgcctggctgtggggggagcggctggtcagcctcaacctcctgtcccccaccgtgctgtccatgtgtcgggaggcgcccgggagcctgctcctctgctcggccccgtcggctgccccggaggccttggtggacagcgtgatagcacccagccggtcggtgctatgccaggaggtggaggtggccatccccttacccgcccgctccctgctggtcctcaccggggcggcacggcaccagtggaagcatgccatccaccgcagacac

SEQ ID NO: 2338 - DNA, 1389 bp, Artificial
  cDNA Sequence
ctctgcgttgtggggaggacgcgcgctcgcgcgggattttcaagcgtaggcccccgggaactcgagctgccatgagcctctgggtggacaagtatcggccctgctccttgggacggctggactatcacaaggagcaggcggcccagctgcggaacctggtgcagtgtggtgactttcctcatctgttagtgtacggaccatcaggtgctggaaaaaagacaagaattatgtgtattctacgtgaactttatggtgttggagtggaaaaattgagaattgaacatcagaccatcacaactccatctaaaaaaaaaattgaaattagcaccattgcaagtaactaccaccttgaagttaatcctagtgatgctggaaatagtgaccgagtagtcattcaggagatgttgaaaacagtggcacaatcacaacaacttgaaacaaactctcaaagggattttaaagtggtattattgacagaagttgacaaactcaccaaagatgctcagcatgccttgcgaagaaccatggaaaaatatatgtctacctgcagattgatcttgtgctgcaattctacatctaaagtgatcccacctattcgtagtaggtgcttggcggttcgtgtgcctgctcccagcattgaagatgaaggtctgaatcttccttcacaactggctcatagacttgcagagaagtcttgtagaaatctcagaaaagccctgcttatgtgtgaagcctgcagagtgcaacaatatccttttactgcagatcaagaaatccctgagacagattgggaggtgtatctgagggagactgcaaatgctattgtcagtcagcaaactccacaaaggctccttgaagttcgtggaaggctgtatgagcttctaactcattgtattcctcctgagataataatgaaggcatgtaaggaggaatcaagaagctgtgacatattctgaggacctccaaagaacaacttgctactgactggacttctctcatcttttagcatgtgaagttttgcaaatataatccactttgctctgaatgtcctgacacctgcttcagagctcaagattcagactccagcctgaatgttatttcctgagaaaatccctccctgacccactgtgctggttaggtccacctgctaatcacatccacaaaaccctctgcttctccttcaaaacactcatctcctctgtaatgatcagatgaactcatgtctttctcagaggacaataaatttgatgaatggggaccatggaagtttatttccatctgtatccctacatctaactcatctgctggtacctatttgtcatgtatttaataagtacaactacctatgccaccctgcaataaaatgatattgttactttctcttcttta

SEQ ID NO: 2339 - DNA, 1109 bp, Artificial
  cDNA Sequence
ctctgcgttgtggggaggacgcgcgctcgcgcgggattttcaagcgtaggcccccgggaactcgagctgccatgagcctctgggtggacaagtatcggccctgctccttgggacggctggactatcacaaggagcaggcggcccagctgcggaacctggtgcagtgtggtgactttcctcatctgttagtgtacggaccatcaggtgctggaaaaaagacaagaattatgtgtattctacgtgaactttatggtgttggagtggaaaaattgagaattgaacatcagaccatcacaactccatctaaaaaaaaaattgaaattagcaccattgcaagtaactaccaccttgaagttaatcctagtgatgctggaaatagtgaccgagtagtcattcaggagatgttgaaaacagtggcacaatcacaacaacttgaaacaaactctcaaagggattttaaagtggtattattgacagaagttgacaaactcaccaaagatgctcagcatgccttgcgaagaaccatggaaaaatatatgtctacctgcagattgatcttgtgctgcaattctacatctaaagtgatcccacctattcgtagtaggtgcttggcggttcgtgtgcctgctcccagcattgaagatatttgccacgtgttatctactgtgtgtaagaaggaaggtctgaatcttccttcacaactggctcatagacttgcagagaagtcttgtagaaatctcagaaaagccctgcttatgtgtgaagcctgcagagtgcaacaatatccttttactgcagatcaagaaatccctgagacagattgggaggtgtatctgagggagactgcaaatgctattgtcagtcagcaaactccacaaaggctccttgaagttcgtggaaggctgtatgagcttctaactcattgtattcctcctgagataataatgaaggcatgtaaggaggaatcaagaagctgtgacatattctgaggacctccaaagaacaacttgctactgactggacttctctcatcttttagcatgtgaagttttgcaaatataatccactttgctctgaatgtcctgacacctgcttcagagctcaagatt

SEQ ID NO: 2340 - DNA, 2354 bp, Artificial
  cDNA Sequence
ctctgcgttgtggggaggacgcgcgctcgcgcgggattttcaagcgtaggcccccgggaactcgagctgccatgagcctctgggtggacaagtatcggccctgctccttgggacggctggactatcacaaggagcaggcggcccagctgcggaacctggtgcagtgtggtgactttcctcatctgttagtgtacggaccatcaggtgctggaaaaaagacaagaattatgtgtattctacgtgaactttatggtgttggagtggaaaaattgagaattgaacatcagaccatcacaactccatctaaaaaaaaaattgaaattagcaccattgcaagtaactaccaccttgaagttaatcctagtgatgctggaaatagtgaccgagtagtcattcaggagatgttgaaaacagtggcacaatcacaacaacttgaaacaaactctcaaagggattttaaagtggtattattgacagaagttgacaaactcaccaaagatgctcagcatgccttgcgaagaaccatggaaaaatatatgtctacctgcagattgatcttgtgctgcaattctacatctaaagtgatcccacctattcgtagtaggtgcttggcggttcgtgtgcctgctcccagcattgaagatatttgccacgtgttatctactgtgtgtaagaaggaaggtctgaatcttccttcacaactggctcatagacttgcagagaagtcttgtagaaatctcagaaaagccctgcttatgtgtgaagcctgcagagtgcaacaatatccttttactgcagatcaagaaatccctgagacagattgggaggtgtatctgagggagactgcaaatgctattgtcagtcagcaaactccacaaaggctccttgaagttcgtggaaggctgtatgagcttctaactcattgtattcctcctgagataataatgaagggccttctctcagaactgttacataattgtgatggacaactgaaaggggaggtggcacaaatggcagcttactatgagcatcgtctacagctgggtagcaaagccatttatcacttggaagcgtttgtggccaaattcatggcactttataagaagttcatggaggatggattggaaggcatgatgttctgacttctgtcagttattcttgcaaagatttctcagtatcagtatttacatacagcttatattaaaagagctgtgggtaaattaactgaacttaatcatgtcgtatttgcgtttttttggtaataacttctctgtgaactattaatcatcctctgagttaaataattgctcctatactattgaagtatgtagttttgtacataacttagagactttagagtctaagaaaatgatcttaatttactttaagcattggttattcaagtattcattgttgatcctcctattctcttccgtctaatctctcacctgctaaaggagatttacacattagaaagcaaagattattttcatttatccagatgaccattttctgccacaggtaacatgattgtttgacacaccattatatttaattctagtttctctcaatgaataattgtatttttgtaggaaatgtaagatttcattctgaaacataattattggtatggacaaaattgcagataccatttctgttgaggctgcagatttccaacttttatttcagtggttcagattagtattaggtcggtactaagaaataagcatgttttcactaatttaagtacttgagactcttgaagaaaattcagaatgaagttctggagaaaggtatgttactgtagtaattactctttgaacaggttttgtgttttgtcattagctctgccctttttaattaaatattttggttcatggaccaaagggtttacttgacaaatttgtgtgacagactccgaacaattcctttactacgaagtataatttataaaataaaatatacccattttaagggtacagtttgatttttgaccagtgaaactatgatcccaatcaaggtatagatgccgtcaccccaaaaagttccctccatatccctttgcagtcagttcatccctaccctggcccagatgatcactgatcttgtcattatagatgagttttgccagttcaagaatttaatggaatcagatattgtaagcattcttgtgtaatacttcattctctctcattattgagattcatccatattgttgaatgtttcactagttaatgtttattgttcaatatttttgtatatacttttaaagcctattcacttgctgatggatctttggtttgtttccaggtttggttattatgaataaagttgctgtgaatacttacgtgtaa

SEQ ID NO: 2341 - DNA, 394 bp, Artificial; identical to SEQ ID NO: 1062
  cDNA Sequence

SEQ ID NO: 2342 - DNA, 413 bp, Artificial; identical to SEQ ID NO: 1063
  cDNA Sequence

SEQ ID NO: 2343 - DNA, 887 bp, Artificial
  cDNA Sequence
gcctgcgcagtaagtaagcctgccagacacgctgtggcggctgcctgaagctagtgagtcgcggcgccgcgcacttgtggttgggtcagtgccgcgcgccgctcggtcgttaccgcgaggcgctggtggccttcaggctggacggcgcgggtcagccctggtttgccggcttctgggtctttgaacagccgcgatgtcgatcttcacccccaccaaccagatccgcctaaccaatgtggccgtggtacggatgaagcgcgccaggaagcgcttcgaaatcgcctgctacagaaacaaggtcgtcggctggcggagcggcttggaaaaagaccttgatgaagttctgcagacccactcagtgtttgtaaatgtttcctaaggtcaggttgccaagaaggaagatctcatcagtgcgtttggaacagatgaccaaactgaaatctattttgactaaaggagaagttcaagtatcagataaagacacacacaactggagcagatgtttagggacattgcaattattgtggcagacaaatgtgtgactcctgaaacaaagagaccatacaccgtgatccttattgagagagccatgaaggacatccactatttggtgaaaaccaacaggagtacaaaacagcaggctttggaagtgataaagcagttaaaagagaaaatgaagatagaacgtgctcacatgaggcttcagttcatccttccagtgaatgaaggcaagaagctgaaagaaaagctcaagccactgatcaaggtcatagaaagtaaagattatggccaacagttagaaatcgtaagagtcaaatattttctttgcttcatgttacctaaatattgtattctctagtaataaatttgtagcaaacattcagaca

SEQ ID NO: 2344 - DNA, 534 bp, Artificial
  cDNA Sequence
ctgccagacacgctgtggcggctgcctgaagctagtgagtcgcggcgccgcgcacttgtggttgggtcagtgccgcgcgccgctcggtcgttaccgcgaggcgctggtggccttcaggctggacggcgcgggtcagccctggtttgccggcttctgggtctttgaacagccgcgatgtcgatcttcacccccaccaaccagatccgcctaaccaatgtggccgtggtacggatgaagcgcgccaggaagcgcttcgaaatcgcctgctacagaaacaaggtcgtcggctggcggagcggcttgttgccaagaaggaagatctcatcagtgcgtttggaacagatgaccaaactgaaatctgtaagcaggcggattttgactaaaggagaagttcaagtatcagataaagacacacacaactggagcagatgtttagggacattgcaattattgtggcagacaaatgtgtgactcctgaaacaaagagaccatacaccgtgatccttattgagagagccatgaaggacatccact

SEQ ID NO: 2345 - DNA, 560 bp, Artificial
  cDNA Sequence
cccaccaaccagatccgcctaaccaatgtggccgtggtacggatgaagcgcgccaggaagcgcttcgaaatcgcctgctacagaaacaaggtcgtcggctggcggagcggcttattttgactaaaggagaagttcaagtatcagataaagacacacacaactggagcagatgtttagggacattgcaattattgtggcagacaaatgtgtgactcctgaaacaaagagaccatacaccgtgatccttattgagagagccatgaaggacatccactatttggtgaaaaccaacaggagtacaaaacagcaggctttggaagtgataaagcagttaaaagagaaaatgaagatagaacgtgctcacatgaggcttcagttcatccttccagtgaatgaaggcaagaagctgaaagaaaagctcaagccactgatcaaggtcatagaaagtaaagattatggccaacagttagaaatcgtaagagtcaaatattttctttgcttcatgttacctaaatattgtattctctagtaataaatttgtagcaaacattcagacattg

SEQ ID NO: 2346 - DNA, 649 bp, Artificial
  cDNA Sequence
cgcacatgcgcgccacctccgcactgccctcgcttcctgcgcctcttcaggtcaccgcttgctctagttcccaggctttggcctctagtggatgagaatcaccgagtctgcggggctggacgctgaccgcccgggccagcacctaggcgggcgggagctgtgcggcccagggttcgcgcgggccgggtagaggctcgagccgggacccccgagcgtgaaccccggagccagcggcgctggggccagaggggccaggcgggaggtggtggcggaggcgaaggggcgacgggacctgggcctggcccgtgtgtgtcctcggcggcctggcgccggccgtcgctgtacggtgagccccagggaggcggatctgggccccgagaaggacacccgcctggatttgccccgtaggcccggcccgggcccctcgggagcagaacagccttggtgaggtggacgggaggggacttcgcgagcagacgcgcgcgccagcgacagcagcccgccccggcctctcgggagccgtggggcagaggctgcagagccccaggagggtctatcagccacagtctctgcaagtttccaagagcagcagaaaatgaacacattgcaggggccagtgtcattcaaagatgtggctgtggatttcacc

SEQ ID NO: 2347 - DNA, 1908 bp, Artificial
  cDNA Sequence
actgccctcgcttcctgcgcctcttcaggtcaccgcttgctctagttcccaggctttggcctctagtggatgagaatcaccgagtctgcggggctggacgctgaccgcccgggccagcacctaggcgggcgggagctgtgcggcccagggttcgcgcgggccgggtagaggctcgagccgggacccccgagcgtgaaccccggagccagcggcgctggggccagaggggccaggcgggaggtggtggcggaggcgaaggggcgacgggacctgggcctggcccgtgtgtgtcctcggcggcctggcgccggccgtcgctgtacggtgagccccagggaggcggatctgggccccgagaaggacacccgcctggatttgccccgtaggcccggcccgggcccctcgggagcagaacagccttggtgaggtggacgggaggggacttcgcgagcagacgcgcgcgccagcgacagcagcccgccccggcctctcgggagccgtggggcagaggctgcagagccccaggagggggccagtgtcattcaaagatgtggctgtggatttcacccaggaggagtggtggcaactggaccctgatgagaagataacatacggggatgtgatgttggagaactacagccatctagtttccctggcttatgaggtggcaacatcttgtacttcggagatctgaagccgagcaacttgcccaagtccttcttcttttcccattaacaagatatgatatcaccaagccaaacgtcatcattaagttggagcagggagaggagctgtggataacgggaggtgaatttccatgtcaacatagtccagggattgtgggactttaccaaatcggtttgtaataacacctagaagacgctatccgatccatcaggcccagtattcctgtctgggggtacttcccaccgtgtgctggaatggttatcacaagaaggctgtgctgtcccctcgcaactccaggatggtgtgtagcccagtgactgtgaggatcgcccctcctgacagaagattttcgcgttctgcgataccagagcagataatcagctcaacactgtcctcaccatcaagtaacgccccagacccatgtgcaaaggagacagtactgagtgccctcaaagagaaggagaagaaaaggacagtggaggaagaagaccaaatattccttgatggccaggaaaataaaagaaggcgccatgatagcagtggcagtggacattcagcatttgagcccctggtggccaatggagtccccgcttcttttgtgcctaagcctgggtctctgaagagaggcctcaattctcagagctcagatgaccacttgaataagagatcccgaagctcttccatgagctccttgacaggcgcttacgcaagtggcatccctagctccagccgcaatgccattaccagttcctacagctccactcgaggcatctcacagctctggaagagaaatggccccagttcatcacccttctctagcccagcctcctcccgctcccagacaccggagaggccagcaaagaaaataagagaagaagagatgtgtcatcattccagttcttcaactccattggcagcagacaaggagtcccagggagaaaaggctgcagatacaaccccaaggaagaaacaaaactcgaattctcagtctacacctggcagctctgggcagcgtaagcggaaagttcagctgctgccttctcggcgaggggaacagctgaccttgcctccacctccccagcttggctattcgatcactgccgaggacctagacttagagaagaaggcttcattacagtggttcaaccaggccttggaggacaagagcgatgctgcctcgaactctgtcactgagaccccacctatcactcagccttcatt

SEQ ID NO: 2348 - DNA, 1734 bp, Artificial
  cDNA Sequence
actgccctcgcttcctgcgcctcttcaggtcaccgcttgctctagttcccaggctttggcctctagtggatgagaatcaccgagtctgcggggctggacgctgaccgcccgggccagcacctaggcgggcgggagctgtgcggcccagggttcgcgcgggccgggtagaggctcgagccgggacccccgagcgtgaaccccggagccagcggcgctggggccagaggggccaggcgggaggtggtggcggaggcgaaggggcgacgggacctgggcctggcccgtgtgtgtcctcggcggcctggcgccggccgtcgctgtacggtgagccccagggaggcggatctgggccccgagaaggacacccgcctggatttgccccgtaggcccggcccgggcccctcgggagcagaacagccttggtgaggtggacgggaggggacttcgcgagcagacgcgcgcgccagcgacagcagcccgccccggcctctcgggagccgtggggcagaggctgcagagccccaggagggggccagtgtcattcaaagatgtggctgtggatttcacccaggaggagtggtggcaactggaccctgatgagaagataacatacggggatgtgatgttggagaactacagccatctagtttccctggcttatgaggtggcaacatcttgtacttcggagatctgaagccgagcaacttgcccaagtccttcttcttttcccattaacaagatatgatatcaccaagccaaacgtcatcattaagttggagcagggagaggagctgtggataacgggaggtgaatttccatgtcaacatagtccagggattgtgggactttaccaaatcggtttgtaataacacctagaagacgctatccgatccatcaggcccagtattcctgtctgggggtacttcccaccgtgtgctggaatggttatcacaagaaggctgtgctgtcccctcgcaactccaggatggtgtgtagcccagtgactgtgaggatcgcccctcctgacagaagattttcgcgttctgcgataccagagcagataatcagctcaacactgtcctcaccatcaagtaacgccccagacccatgtgcaaaggagacagtactgagtgccctcaaagagaaggagaagaaaaggacagtggaggaagaagaccaaatattccttgatggccaggaaaataaaagaaggcgccatgatagcagtggcagtggacattcagcatttgagcccctggtggccaatggagtccccgcttcttttgtgcctaagcctgggtctctgaagagaggcctcaattctcagagctcagatgaccacttgaataagagatcccgaagctcttccatgagctccttgacaggcgcttacgcaagtggcatccctagctccagccgcaatgccattaccagttcctacagctccactcgaggcatctcacagctgtggaagagaaatggccccagttcatcacccttctctagcccagcctcatcccgctcccagacaccggagaggccagcaaagaaaataagagaagaagagatgtgtcatcattccagttcttcaactccattggcagcagacaaggagtcccagggagaaaagggtaggttgctgagccaggaggaggggctgctgttggtggtggaggtatttgtggaggatgtagagattaatacctattgaaaaaaggtcttgagcattgctat

SEQ ID NO: 2349 - DNA, 1651 bp, Artificial
  cDNA Sequence
actgccctcgcttcctgcgcctcttcaggtcaccgcttgctctagttcccaggctttggcctctagtggatgagaatcaccgagtctgcggggctggacgctgaccgcccgggccagcacctaggcgggcgggagctgtgcggcccagggttcgcgcgggccgggtagaggctcgagccgggacccccgagcgtgaaccccggagccagcggcgctggggccagaggggccaggcgggaggtggtggcggaggcgaaggggcgacgggacctgggcctggcccgtgtgtgtcctcggcggcctggcgccggccgtcgctgtacggtgagccccagggaggcggatctgggccccgagaaggacacccgcctggatttgccccgtaggcccggcccgggcccctcgggagcagaacagccttggtgaggtggacgggaggggacttcgcgagcagacgcgcgcgccagcgacagcagcccgccccggcctctcgggagccgtggggcagaggctgcagagccccaggagggggccagtgtcattcaaagatgtggctgtggatttcacccaggaggagtggtggcaactggaccctgatgagaagataacatacggggatgtgatgttggagaactacagccatctagtttccctggcttatgaggtggcaacatcttgtacttcggagatctgaagccgagcaacttgcccaagtccttcttcttttcccattaacaagatatgatatcaccaagccaaacgtcatcattaagttggagcagggagaggagctgtggataacgggaggtgaatttccatgtcaacatagtccagggattgtgggactttaccaaatcggtttgtaataacacctagaagacgctatccgatccatcaggcccagtattcctgtctgggggtacttcccaccgtgtgctggaatggttatcacaagaaggctgtgctgtcccctcgcaactccaggatggtgtgtagcccagtgactgtgaggatcgcccctcctgacagaagattttcgcgttctgcgataccagagcagataatcagctcaacactgtcctcaccatcaagtaacgccccagacccatgtgcaaaggagacagtactgagtgccctcaaagagaaggagaagaaaaggacagtggaggaagaagaccaaatattccttgatggccaggaaaataaaagaaggcgccatgatagcagtggcagtggacattcagcatttgagcccctggtggccaatggagtccccgcttcttttgtgcctaagcctgggtctctgaagagaggcctcaattctcagagctcagatgaccacttgaataagagatcccgaagctcttccatgagctccttgacaggcgcttacgcaagtggcatccctagctccagccgcaatgccattaccagttcctacagctccactcgaggcatctcacagctctggaagagaaatggccccagttcatcacccttctctagcccagcctcctcccgctcccagacaccggagaggccagcaaagaaaataagagaagaggagctgtgtcatcattccagttcttcaactccattggcagcagacagggagtcccagggagaaaaggctgcagatacaaccccaagg

SEQ ID NO: 2350 - DNA, 1633 bp, Artificial
  cDNA Sequence
actgccctcgcttcctgcgcctcttcaggtcaccgcttgctctagttcccaggctttggcctctagtggatgagaatcaccgagtctgcggggctggacgctgaccgcccgggccagcacctaggcgggcgggagctgtgcggcccagggttcgcgcgggccgggtagaggctcgagccgggacccccgagcgtgaaccccggagccagcggcgctggggccagaggggccaggcgggaggtggtggcggaggcgaaggggcgacgggacctgggcctggcccgtgtgtgtcctcggcggcctggcgccggccgtcgctgtacggtgagccccagggaggcggatctgggccccgagaaggacacccgcctggatttgccccgtaggcccggcccgggcccctcgggagcagaacagccttggtgaggtggacgggaggggacttcgcgagcagacgcgcgcgccagcgacagcagcccgccccggcctctcgggagccgtggggcagaggctgcagagccccaggagggggccagtgtcattcaaagatgtggctgtggatttcacccaggaggagtggtggcaactggaccctgatgagaagataacatacggggatgtgatgttggagaactacagccatctagtttccctggcttatgaggtggcaacatcttgtacttcggagatctgaagccgagcaacttgcccaagtccttcttcttttcccattaacaagatatgatatcaccaagccaaacgtcatcattaagttggagcagggagaggagctgtggataacgggaggtgaatttccatgtcaacatagtccagggattgtgggactttaccaaatcggtttgtaataacacctagaagacgctatccgatccatcaggcccagtattcctgtctgggggtacttcccaccgtgtgctggaatggttatcacaagaaggctgtgctgtcccctcgcaactccaggatggtgtgtagcccagtgactgtgaggatcgcccctcctgacagaagattttcgcgttctgcgataccagagcagataatcagctcaacactgtcctcaccatcaagtaacgccccagacccatgtgcaaaggagacagtactgagtgccctcaaagagaaggagaagaaaaggacagtggaggaagaagaccaaatattccttgatggccaggaaaataaaagaaggcgccatgatagcagtggcagtggacattcagcatttgagcccctggtggccaatggagtccccgcttcttttgtgcctaagcctgggtctctgaagagaggcctcaattctcagagctcagatgaccacttgaataagagatcccgaagctcttccatgagctccttgacaggcgcttacgcaagtggcatccctagctccagccgcaatgccattaccagttcctacagctccactcgaggcatctcacagctctggaagagaaatggccccagttcatcacccttctctagcccagcctcctcccgctcccagacaccggagaggccagcaaagaaaataagagaagaggagctgtgtcatcattccagttcttcaactccattggcagcagacagggagtcccagggagaaaagggt

SEQ ID NO: 2351 - DNA, 681 bp, Artificial
  cDNA Sequence
actgccctcgcttcctgcgcctcttcaggtcaccgcttgctctagttcccaggctttggcctctagtggatgagaatcaccgagtctgcggggctggacgctgaccgcccgggccagcacctaggcgggcgggagctgtgcggcccagggttcgcgcgggccgggtagaggctcgagccgggacccccgagcgtgaaccccggagccagcggcgctggggccagaggggccaggcgggaggtggtggcggaggcgaaggggcgacgggacctgggcctggcccgtgtgtgtcctcggcggcctggcgccggccgtcgctgtacggtgagccccagggaggcggatctgggccccgagaaggacacccgcctggatttgccccgtaggcccggcccgggcccctcgggagcagaacagccttggtgaggtggacgggaggggacttcgcgagcagacgcgcgcgccagcgacagcagcccgccccggcctctcgggagccgtggggcagaggctgcagagccccaggaggatttcgaccgcctctaaacgtccgtcagcacttctattctctcacttaagtgtctgctgatcacccccttatatctgccctgggagaatcgtagtaatgcaggaacagtctgcagggattctctgctgctgcctcagttgctaggggaagag

SEQ ID NO: 2352 - DNA, 1044 bp, Artificial
  cDNA Sequence
caaacgtcatcattaagttggagcagggagaggagctgtggataacgggaggtgaatttccatgtcaacatagtccagcatttatttgaaagataaacctcttggatgtgactctggagacaagaccagcagctcgagaccattcaatccaaggtataaaatgggagaaaatcagctccatcatggtctgaattgaggatgaggcagaagagcagagaatagcggatgcccaggtggcagcaacttaactcttttcctgtggacttgcggggtctccccacctccactgcgtcgggacatgccgtgtgccgtctctttatccatagctgcctccggcatcagcagagaaagtcatgggcagatggagccgtggattagttcttttttccagtcttcctttactttatctggataagattgggcagattgaatttgatcttctatactggggccagggagcagggtggatctagaccatgcagcttttccccactgtcaccagtttgggagcagggattggctgccattgtcctgtctagcctccgtgttcctgggacaccgctgactggaggctgctcctcttctaagggagtctggcatagaagacacgacccagagcacatggcaccttctctcttctcctgcaccagtctccttgcccctctgtattgtcatcatactgaagcaaaccatccaactcaccagcgtctctggactcgtttcattgattcctctccctgaaactcttcctcattctccttttagcccttcacatcctcagccgaagatctcacttcctcccagaggcctttgctgactgacccctcaggtaggctaaatccccatcctgcgcttccatgacagcctgtagcagatgctgttttctgcaggtggccacagccctatctcccatcccacacactcctctcataacatgaccgtgtcacttcttccatcgcgtggtcggggttatgtctcttttctttgagcctatgcacatctttgtgattgccctgaccaataaataaagtaggacagaagcga

SEQ ID NO: 2353 - DNA, 247 bp, Artificial
  cDNA Sequence
ctgccgaggacctagacttagagaagaaggcttcattacagtggttcaaccaggccttggaggacaagagcgatgctgcctcgaactctgtcactgagaccccacctatcactcagccttcatttacctttaccctgcctgctgctgcacctgcctccccacccacctccctcctggccccaagcaccaacccactgttagagagcttgaagaagatgcagactcccccgagcctgccaccctgccc

SEQ ID NO: 2354 - DNA, 4186 bp, Artificial
  cDNA Sequence
attacagtggttcaaccaggccttggaggacaagagcgatgctgcctcgaactctgtcactgagaccccacctatcactcagccttcatttacctttaccctgcctgctgctgcacctgcctccccacccacctccctcctggccccaagcaccaacccactgttagagagcttgaagaagatgcagactcccccgagcctgccaccctgcccagaatctgctggagcagcaaccactgaggccctctcacctccaaagacacccagcctcctacccccgctgggtttatcacagtcagggccgccagggctgctccccagcccctcctttgactccaaacccccgaccactttgctggggctgatccctgctccatccatggtaccagccactgacaccaaggcacctccaacccttcaggcagagacggctaccaaaccccaagccacatctgccccgtcccccgcccccaagcaaagcttcctgtttggaacacagaacacctcaccttccagccctgccgcccctgctgcatcttcagcacctcccatgttcaagcccattttcacggctccacccaagagtgagaaggaaggccccacaccgcctggcccttcagtcacagccacagcgccctccagctcctccctccccacgaccaccagcaccacagccccgaccttccagcctgtctttagcagcatggggccacctgcatctgtgcccttgcctgctcccttcttcaagcagacaactactcccgccactgctcccaccacaactgccccgctcttcactggcctggccagcgccacctctgctgtggctcccatcacctctgccagtccatccacagactctgcttcgaagcctgcgtttggctttggcataaacagtgtgagcagcagcagtgtgagtaccacgaccagcaccgccactgccgcctcacagcctttcctcttcggggcgccccaggcctctgctgccagcttcaccccggccatgggctccatattccagtttggcaaacctcctgccttgcccacaaccaccacagtcaccaccttcagccagtccctgcacactgccgtgccaacggccaccagcagcagcgctgccgactttagtggttttggcagcaccctcgccacctccgccccggccaccagcagccagcccactctgacgttcagtaacacgagcacccccacgttcaacattccctttggctcaagcgccaagtccccgctcccatcatatccgggagccaacccccagcccgcatttggggccgctgaggggcagccaccgggggccgccaagccggcccttgcccccagctttggcagctctttcacttttggaaactctgcagccccggctgctgcacccacacctgcacctccgtccatgatcaaggtcgtgcctgcgtacgtgcctacgcccatccatcctatctttggcggtgccacgcactcggcgtttgggttgaaagccacggcttcggccttcggcgctcccgccagctcacagcccgcctttggcggctccactgctgtcttcttcggtgcagccaccagctccggctttggagccaccacccagaccgccagcagcgggagcagcagctcggtgtttggcagcacaacaccatcacccttcacgtttgggggttcggcagcccccgctggcagtgggagctttgggatcaatgtggccaccccaggctccagcaccaccaccggagctttcagctttggagcaggacagagtgggagcacagccacctccacccccttcgcagggggcttaggtcagaacgccctgggcaccaccggccagagcacaccgtttgccttcaacgtgagcagcacaactgagagcaaacctgtgtttggaggcaccgccacccccacctttggtctgaacacccctgcgcctggagtgggcacatcaggcagcagcctctcctttggggcatcctcagcacccgcccaaggctttgttggtgttgcacctttcggatcggcggccctttcattttccattggtgcgggatccaagaccccaggggctcgacagcgactgcaggcccgaaggcagcacacccgcaaaaagtagcctttgtcccctgtccctgttccccccaccccttccctaaatctggaccttggcacctgctaggaagagccttggacccttccagttgcgtaaagcaaacctaccccggatctctggcttcagccgccagggggcagtggcagccctggggccctttcccttctggaggaagcacaagcctcagggaaggggaagcaggatgcggagggccaaagcccgggacctctacttgaacagttctactggggaggctggagaactaaggaaacacctgtacatagtgtccgctgccctgactcccgcttagcacacccttaggcaggcgccccttccacctttccccgagaccgtcgtcgctggagggggcagggtccagcccgcctggatcggtggtgtgcacctgatgggatttgggaaatgggctatccgtaaagctttatcttgcttggcttagctgtgagaagtggttctcttcctctggtcccttctggggactctgtttccccatttcttgctgctgtgtccctcaccagttccttgcaggattccttcgtttttaaatgcccttgaatctagctttgccttggagaccccagtgggtgctgctcctgccgttttcttcctgccaagcctgaatcaatgtttcatctccaaccctctgccagtttggcccctcagagcttggtggctcaagactgttagcctggcagagccaggggtgaagggagaagctcttggagcaggcaggatgcccaccgctgcttcagctgcctcctcgcccagctaccctttggccccattgggccctcgtctgcctctccaggattgtatgtttcaagccttgtcctgtgttcctttgtctgacgctctgtgtattgctctttgaatcgagtttggaggaagagttgagttgtatgagtggcggcatgttggtagtgccggacttcctgtttcaagttttctggggcctcgctaattgaatgtggaaagtagcaccacttgacggctacaagtgccgactcctgaattttcccatggtgttctgacttcaagggctggcagccagggagaatgggcccaggggaagcaaagacctcttccctctgccgtttctgtcccacttaactgacctcactggaggctacatcacccaaagtagatgttagaaaacctaaattaatgaaccatatttttaaaatcctatttttcccaaacagggccctctgcagcccatcctttccttccgtccttctgaaaccacataccccaggcccaagcgccttgctgccacgcccaacctctttgggagaagtatgaatgcgtgtgtctaaattaaaagaaaaaaatatttaaacgttttttaacaaaaatttatttttgtatttaagctaaattgccttttaaattccttcaagcttggttcattgaggtggttaagtataaatgctattaactaggaattagctgtatagttaagttatgcctgtgcaaagaagaggctcaaatgctgtccccggcagctttcctgggggactagagctccttctggccatgttatatgaaatgtaattcttattttataaataatgtgatgtaaatgtaactggtgccccctccccgatgtgactgagggtgagtgagtggtggcggggctgctccttcccacccctcagaacagctctgatcctcgttaatacctggctgcgtgtgcagctgaggagggagtgaacctcaagcctaaatacctgttaggattggagggtctgggtgggcctgggcctagcaatcaagcttctacctgtaccttatgtaaggtagaccctcctagtgtcagtacctgagctagtttacctcagttccgcaggcaggacagccggtccgggaaccctgagtgagaatgagtgtggatgtgtacagtacacgcactggacggcagcgggaggctgggactttccattacaaatagagacttcattcctgttgagtctagttggaatttttagtatgaatgtgagatttttctcctgcttgtgacattaagaataaaaaactgtgatctatcgt

SEQ ID NO: 2355 - DNA, 1897 bp, Artificial
  cDNA Sequence
agcgagcctctgtcaatcaatcaatcaatcaatcaatcagtgtcttgtctgggcctaaattctctagaatacaatggaagagggaaagtgaaagaaggtggaagtaacccacagctgggagccctgaaccctgctggtggcaggtggctctcgtgtcctcaccaggttgccctgcaatcacatgctgcatcctttttcctgaacctgccccacgtgccccaccacgcagccactccgagggctccttcaagggcggcagccctgtcactcacgtgttccaaaagtgcttcccctgtgccctgacggcctcgccatgtgtcccatcatgccccacgcgctcccactgtgcgccccacctcgcacccgtgccccatcatgctctgcgtgctcgttaggtgccccatcatttcccgctcgctctcattacgtacccagcctccggcccctgtaagtgccccatcgtgctctctgtcgctccagttagatgccccatcctgccccgcgagctccaattacgtgccccacctaaccccccatgtccgtgccccatcatgccccgcacgctctggttacatgccccgcctggcgctcccgcacatgccccatcatgctcagcgcgctcccattacgtgccgccacctcgcgcccctgcaagtgcccaatgtgccctgtgtggtcccgttacgtgtcccatcatgttttgtgcgctccgattacgggccacacctggcaactcaccgtgcgacctctgtagttccagagctcgcgagggccagggccgttggcggcggttggaacgaaacgatgagtgcctcctcgtggccccagaatggaatgccgccgtcggtaggggtctgccgggcataaaggggccttcggaaccccaccagagtcacagccaggaagggcagcggggcgcaccaggccgaaggctcacgccacagggagggcagctaggacatggggggaagcgcgttaaaccagggagtcctggaaggggacgacgcccccggccagtccctgtacgagcggttaagtcagaggatgctggacatctcgggggaccggggcgtgctgaaggacgtcatccgagaaggagctggagacctagtggcgcctgatgcttcggtgctagatattacattgtggggcatggagctgggccttctgagcatgcagagaggagagctggccaggtttctgttcaaaccgaactacgcctatggaacgctgggctcccctcccttgatccccccaaacaccactgtcctgttcaagattgagctgcttgacttcctagactgtgctgagtcagacaagttttgtgctctctcagctgtacgttgcagagcacaaatgtcagcactttatagagagacaaatgggttggtgtttttggtaattcttctagatggcctgccctgaggctgatcgtccgccactgcactccagcatgggcaacagagcaagactccatctcaaaaaaaaaaaaaaagccagctgggattttttttttgagacatgaccttgcactgttgcgcaggccggagagcagtgatgtgatcatagcccactgcagcctcaaactcctgggctcaagcgatcctccttcctcagcctcctgggtagctgggactacaggctggcaccacaacgcctggctaatttctatattttttgtagagatcatgttgccaggctggtctcaaatttctcggctcaagcaatcctcccaccttggctcttgaagtgccaggattacagaagtgagccgccacacccagccacagctgggattttgatagggattgtgttgaatctgtagatcacttctgaagtaatgaaattttaataatattaagtcttttaatccatgaacatgatttccttccattta

SEQ ID NO: 2356 - DNA, 637 bp, Artificial
  cDNA Sequence
tttttttttttttttttaattttttgtagagacagggtctcgctatgtcacccacgctggtctcaaactcacgggctcaagcaatcctcccatctttggcctcccaaagtactgagactacaaacatgagccatcttgcccagcccctagaacgtgttatcaaataaacaccgatgcaaccctcactcagccgagaagtaaaacattgccagccaatccctaaatgcttctgcttgccgcttcccaatcctaaccaatgccttctcctgacaattatgatggtcatgtctttgcatttctctaatgtttcccatcacgatcaaactagttttgttttgcctgtgtccaaactttgcataaatgagcagcatgtgtctggtggacctggcttcttccactcaacattatgataagaagattgaccatttggtgcccatagctattgctcttgcattttcattgctctatagattcttactcaacataccttaaaattttttttattctgaaataagagcgggatgctattaaaaaaagaaaaaagaagagaacaaaaaagtcctccagtaaatttaaaatatggtagtcaaggccgggcacgccacatggtgtcttccatgacagctccctctctgct

SEQ ID NO: 2357 - DNA, 300 bp, Artificial
  cDNA Sequence
gtgggagccgttgagggcactttcccagtccccgaggcggatccggtgttgcatccttggagagagctgagagctcgagtacagaacctgctaaggccatcaaacctattgatcggaagtcagtccatcagatttgctctgggccggtggtactgagtctaagcactgcggtgaagaagatagtaggaaacagtctggatgctggtgccactaatattgatctaaagcttaaggactatggaatggatctcattgaagtttcaggcaatggatgtggggtagaagaagaaaacttcgaag

SEQ ID NO: 2358 - DNA, 1803 bp, Artificial
  cDNA Sequence
cgaggcggatccggtgttgcatccttggagagagctgagagctcgagtacagaacctgctaaggccatcaaacctattgatcggaagtcagtccatcagatttgctctgggccggtggtactgagtctaagcactgcggtgaagaagatagtaggaaacagtctggatgctggtgccactaatattgatctaaagcttaaggactatggaatggatctcattgaagtttcaggcaatggatgtggggtagaagaagaaaacttcgaaggcttaatctctttcagctctgaaacatcacacatctaagattcaagagtttgccgacctaactcgggttgaaacttttggctttcgggggaaagctctgagctcactttgtgcactgagtgatgtcaccatttctacctgccacgtatcggcgaaggttgggactcgactggtgtttgatcacgatgggaaaatcatccagaaaaccccctacccccaccccagagggaccacagtcagcgtgaagcagttattttctacgctacctgtgcgccataaggaatttcaaaggaatattaagaaggactcctagaagtaccccaccccacccctgctccttggaggacaacgtgatcactgtattcagctctgtcaagaatggtccaggttcttctagatgatctgcacaaatggttcctctcctccttcctgatgtctgccattagcattggaataaagttcctgctgaaaatccacatctcccctgggtccggtgttctggaagtgagagagacaatgtcacacttcaaggaggcagctctctagacaggaaggttattcacgtcccatgtcaagtctagctagagttcagagcaattgagaagtgcaattttatctcctgcctttcattctataccctgcttctgaaccatcgtgttcaactgtgaaactcacactttggtgaccctgactccaaaacttaatacacccaaggtcagccccagtgatctgcttcatagccaggactttgggtgggtcttcccagggagtagggcaccctcagagaatgtggctttggacttcatcacagctggggccttttgtgtcacttcagatctaaacttgtaaccgtgctagatctgtttctaacgtgacaacatcacgaaccacgagtccagaagcctaatccataatcctccctcctcatgacgaagtctcatgctctgtgctcaacatggttagctgcacaagatgtaaaccaaagcttcactgaaccctcgacccaaatcggtaactcaagtgcatcaatcataatgaacctccccgaactcagtatttatgattatttttgaggcagggtctcactctgtcgcccgggctggagtgcagtggcaggatcagggctccctgcagccccgacctcccaggctccagcgatcctcccgcctcagcctcctgagtagttgggagtagagatgcctcccacatcgcctggctaatttttgtatttttgtggagaggggatctcgccacgttgcccaggcttgaagccagatcaagcaattgggttccttggatttccgaaatagaccccaatattctgcctttaccccggaggatgcagatgtaccttctctcaggccgatgacctcaggcctccacggtccctggagctctaggaaaggtgggcgcgatctcgcgcccacacccagtgctctgggtcataagcctggatctggaaaaacaaacgcgctttgagaagacggggactccccaggatacccctctctcccctcgtccagcctccagcccacc

SEQ ID NO: 2359 - DNA, 2312 bp, Artificial
  cDNA Sequence
ggtgttgcatccttggagagagctgagagctcgagaacctgctaaggccatcaaacctattgatcggaagtcagtccatcagatttgctctgggccggtggtactgagtctaagcactgcggtgaagaagatagtaggaaacagtctggatgctggtgccactaatattgatctaaagcttaaggactatggaatggatctcattgaagtttcaggcaatggatgtggggtagaagaagaaaacttcgaaggcttaatctctttcagctctgaaacatcacacatctaagattcaagagtttgccgacctaactcgggttgaaacttttggctttcgggggaaagctctgagctcactttgtgcactgagtgatgtcaccatttctacctgccacgtatcggcgaaggttgggactcaactggtgtttttgatcacgatgggaaaatcatccagaaaaccccctacccccaccccagagggaccacagtcagcgtgaagcagttattttctacgctacctgtgcgccataaggaatttcaaaggaatattaagaagtacagaacctgctaaggccatcaaacctattgatcggaagtcagtccatcagatttgctctgggccggtggtactgagtctaagcactgcggtgaagaagatagtaggaaacagtctggatgctggtgccactaatattgatctaaagcttaaggactatggaatggatctcattgaagtttcaggcaatggatgtggggtagaagaagaaaacttcgaaggcttaatctctttcagctctgaaacatcacacatctaagattcaagagtttgccgacctaactcgggttgaaacttttggctttcgggggaaagctctgagctcactttgtgcactgagtgatgtcaccatttctacctgccacgtatcggcgaaggttgggactcgactggtgtttgatcacgatgggaaaatcatccagaaaaccccctacccccaccccagagggaccacagtcagcgtgaagcagttattttctacgctacctgtgcgccataaggaatttcaaaggaatattaagaaggactcctagaagtaccccaccccacccctgctccttggaggacaacgtgatcactgtattcagctctgtcaagaatggtccaggttcttctagatgatctgcacaaatggttcctctcctccttcctgatgtctgccattagcattggaataaagttcctgctgaaaatccacatctcccctgggtccggtgttctggaagtgagagagacaatgtcacacttcaaggaggcagctctctagacaggaaggttattcacgtcccatgtcaagtctagctagagttcagagcaattgagaagtgcaattttatctcctgcctttcattctataccctgcttctgaaccatcgtgttcaactgtgaaactcacactttggtgaccctgactccaaaacttaatacacccaaggtcagccccagtgatctgcttcatagccaggactttgggtgggtcttcccagggagtagggcaccctcagagaatgtggctttggacttcatcacagctggggccttttgtgtcacttcagatctaaacttgtaaccgtgctagatctgtttctaacgtgacaacatcacgaaccacgagtccagaagcctaatccataatcctccctcctcatgacgaagtctcatgctctgtgctcaacatggttagctgcacaagatgtaaaccaaagcttcactgaaccctcgacccaaatcggtaactcaagtgcatcaatcataatgaacctccccgaactcagtatttatgattatttttgaggcagggtctcactctgtcgcccgggctggagtgcagtggcaggatcagggctccctgcagccccgacctcccaggctccagcgatcctcccgcctcagcctcctgagtagttgggagtagagatgcctcccacatcgcctggctaatttttgtatttttgtggagaggggatctcgccacgttgcccaggcttgaagccagatcaagcaattgggttccttggatttccgaaatagaccccaatattctgcctttaccccggaggatgcagatgtaccttctctcaggccgatgacctcaggcctccacggtccctggagctctaggaaaggtgggcgcgatctcgcgcccacacccagtgctctgggtcataagcctggatctggaaaaacaaacgcgctttgagaagacggggactccccaggatacccctctctcccctcgtccagcctccagcccacc

SEQ ID NO: 2360 - DNA, 1788 bp, Artificial
  cDNA Sequence
ggtgttgcatccttggagagagctgagagctcgagaacctgctaaggccatcaaacctattgatcggaagtcagtccatcagatttgctctgggccggtggtactgagtctaagcactgcggtgaagaagatagtaggaaacagtctggatgctggtgccactaatattgatctaaagcttaaggactatggaatggatctcattgaagtttcaggcaatggatgtggggtagaagaagaaaacttcgaaggcttaatctctttcagctctgaaacatcacacatctaagattcaagagtttgccgacctaactcgggttgaaacttttggctttcgggggaaagctctgagctcactttgtgcactgagtgatgtcaccatttctacctgccacgtatcggcgaaggttgggactcaactggtgtttttgatcacgatgggaaaatcatccagaaaaccccctacccccaccccagagggaccacagtcagcgtgaagcagttattttctacgctacctgtgcgccataaggaatttcaaaggaatattaagaaggactcctagaagtaccccaccccacccctgctccttggaggacaacgtgatcactgtattcagctctgtcaagaatggtccaggttcttctagatgatctgcacaaatggttcctctcctccttcctgatgtctgccattagcattggaataaagttcctgctgaaaatccacatctcccctgggtccggtgttctggaagtgagagagacaatgtcacacttcaaggaggcagctctctagacaggaaggttattcacgtcccatgtcaagtctagctagagttcagagcaattgagaagtgcaattttatctcctgcctttcattctataccctgcttctgaaccatcgtgttcaactgtgaaactcacactttggtgaccctgactccaaaacttaatacacccaaggtcagccccagtgatctgcttcatagccaggactttgggtgggtcttcccagggagtagggcaccctcagagaatgtggctttggacttcatcacagctggggccttttgtgtcacttcagatctaaacttgtaaccgtgctagatctgtttctaacgtgacaacatcacgaaccacgagtccagaagcctaatccataatcctccctcctcatgacgaagtctcatgctctgtgctcaacatggttagctgcacaagatgtaaaccaaagcttcactgaaccctcgacccaaatcggtaactcaagtgcatcaatcataatgaacctccccgaactcagtatttatgattatttttgaggcagggtctcactctgtcgcccgggctggagtgcagtggcaggatcagggctccctgcagccccgacctcccaggctccagcgatcctcccgcctcagcctcctgagtagttgggagtagagatgcctcccacatcgcctggctaatttttgtatttttgtggagaggggatctcgccacgttgcccaggcttgaagccagatcaagcaattgggttccttggatttccgaaatagaccccaatattctgcctttaccccggaggatgcagatgtaccttctctcaggccgatgacctcaggcctccacggtccctggagctctaggaaaggtgggcgcgatctcgcgcccacacccagtgctctgggtcataagcctggatctggaaaaacaaacgcgctttgagaagacggggactccccaggatacccctctctcccctcgtccagcctccagcccacc

SEQ ID NO: 2361 - DNA, 2143 bp, Artificial
  cDNA Sequence
gatctaaagcttaaggactatggaatggatctcattgaagtttcaggcaatggatgtggggtagaagaagaaaacttcgaaggcttaatctctttcagctctgaaacatcacacatctaagattcaagagtttgccgacctaactcgggttgaaacttttggctttcgggggaaagctctgagctcactttgtgcactgagtgatgtcaccatttctacctgccacgtatcggcgaaggttgggactcaactggtgtttttgatcacgatgggaaaatcatccagaaaaccccctacccccaccccagagggaccacagtcagcgtgaagcagttattttctacgctacctgtgcgccataaggaatttcaaaggaatattaagaagtacagaacctgctaaggccatcaaacctattgatcggaagtcagtccatcagatttgctctgggccggtggtactgagtctaagcactgcggtgaagaagatagtaggaaacagtctggatgctggtgccactaatattgatctaaagcttaaggactatggaatggatctcattgaagtttcaggcaatggatgtggggtagaagaagaaaacttcgaaggcttaatctctttcagctctgaaacatcacacatctaagattcaagagtttgccgacctaactcgggttgaaacttttggctttcgggggaaagctctgagctcactttgtgcactgagtgatgtcaccatttctacctgccacgtatcggcgaaggttgggactcgactggtgtttgatcacgatgggaaaatcatccagaaaaccccctacccccaccccagagggaccacagtcagcgtgaagcagttattttctacgctacctgtgcgccataaggaatttcaaaggaatattaagaaggactcctagaagtaccccaccccacccctgctccttggaggacaacgtgatcactgtattcagctctgtcaagaatggtccaggttcttctagatgatctgcacaaatggttcctctcctccttcctgatgtctgccattagcattggaataaagttcctgctgaaaatccacatctcccctgggtccggtgttctggaagtgagagagacaatgtcacacttcaaggaggcagctctctagacaggaaggttattcacgtcccatgtcaagtctagctagagttcagagcaattgagaagtgcaattttatctcctgcctttcattctataccctgcttctgaaccatcgtgttcaactgtgaaactcacactttggtgaccctgactccaaaacttaatacacccaaggtcagccccagtgatctgcttcatagccaggactttgggtgggtcttcccagggagtagggcaccctcagagaatgtggctttggacttcatcacagctggggccttttgtgtcacttcagatctaaacttgtaaccgtgctagatctgtttctaacgtgacaacatcacgaaccacgagtccagaagcctaatccataatcctccctcctcatgacgaagtctcatgctctgtgctcaacatggttagctgcacaagatgtaaaccaaagcttcactgaaccctcgacccaaatcggtaactcaagtgcatcaatcataatgaacctccccgaactcagtatttatgattatttttgaggcagggtctcactctgtcgcccgggctggagtgcagtggcaggatcagggctccctgcagccccgacctcccaggctccagcgatcctcccgcctcagcctcctgagtagttgggagtagagatgcctcccacatcgcctggctaatttttgtatttttgtggagaggggatctcgccacgttgcccaggcttgaagccagatcaagcaattgggttccttggatttccgaaatagaccccaatattctgcctttaccccggaggatgcagatgtaccttctctcaggccgatgacctcaggcctccacggtccctggagctctaggaaaggtgggcgcgatctcgcgcccacacccagtgctctgggtcataagcctggatctggaaaaacaaacgcgctttgagaagacggggactccccaggatacccctctctcccctcgtccagcctccagcccacc

SEQ ID NO: 2362 - DNA, 777 bp, Artificial
  cDNA Sequence
gggcggacgatggaactccacatcctggagcaccggctgcaagttgccagcgtcgccaaggagagtatcccgctgttcacctacggcctgatcaaacttgccttcctgtcctccaagaccagatgatgattattctccaccgtctaagagaccaaaggccaatgagctaccgcagccaccagtcccggaacccgccaatgctgggaagcggaaagtgagggagttcaacttcgagaaatggaatgctcgcatcactgatctacgtaaacaagttgaagaattgtttgaaaggaaatatgctcaagccataaaagccaaaggtccggtgacgatcccgtaccctcttttctagtctcatgttgaagatctttatgtagaaggacttcctgaaggaattccttttagaaggccatctacttacggaattcctcgcctggagaggatattacttgcaaaggaaaggattcgttttgtgattaagaaacatgagcttctgagttcaacacgtgaagatttacagcttgataagccagcttcaggagtaaaggaagaatggtatgccagaatcactaaattaagaaagatggtggatcagcttttctgcaaaaaatttgcggaagccttggggagcactgaagccaaggctgtaccgtaccaaaaatttgaggcacacccgaatgatctgtacgtggaaggactgccagaaaacattcctttccgaagtccctcatggtatggaatcccaaggctggaaaaaatcattcaagtgggcaatcg

SEQ ID NO: 2363 - DNA, 547 bp, Artificial
  cDNA Sequence
catagctgtggtaacatttgttgcatgaatggaccgttgaaatggggcctggcagggagaaattcaggaaatgaatgaatggttcttccctggcagcctcgatgacttacgagccctcaaggggaagcattttctcctggaccccttgatgccggagctgctggtgtttcccgcccagacagatctgcatgaacacccactgtaccgggccggacacctcattctgcaggacagggccagctgtctcccagccatgctgctggacccccgccaggctcccatgtcatggatgcctgtgccaccccaggcaataaagaccagtcacttggctgctcttctgaagaaccaagggaagatctttgcctttgacctggatgccaggcggctggcatccatggccacgctgctggcctgggctggcgtctcctgctgtgagctggctgaggaggacttcctggcggtctcccccttagatccgcgctatcgtgaggtccactatgtcctgctggatccttcctgcagtggctcgggtgagatggtgagaagg

SEQ ID NO: 2364 - DNA, 1155 bp, Artificial
  cDNA Sequence
cgtaaaggcgcgcgggaacatggggctgtacgctgcggtggcaggcgtgctggccggcgtggagagccgccagggctctatcaaggggctggtgtactccagcaacttccagaacgtgaagcagctgtacgcgctggtgtgcgaaacgcagcgctactccgccgtgctggatgccgtgatctccagcgccggcctcctcagtgcgaagaagctgcagccgcacctggccaagggtaggggcggggcggggaagtgaaccccgacggtcagcgctttgtcatctggtttcagccccgctgccgtgcacggcgggactggagcaagtcgctcacctgaaatgagtatgagcagaccttccctgggttacgaattgagatgggatgaaaatgctttaacttcgagtgttttgaaggattaaataaccgaagtacaaagtagtagtagcggagacagtaaggaagtcgggcgtggcggcgcgcacctgtggtcccagctactcggaaggctgaggggggaggatcacttgagcccaggagttcgaagctgcagtgagctgtgatgtggccactgcacttcagcctgggcgacagatctagaccccattctaaaaaaaaacaaaaaccccaaacccacacccacgaaagggtaatgttggcaagaagttgggtgcagaggtctactggtgaacatctgtggggaaagggtctaaggctgggaagcgagacgccaggttccgatcctgttgtgtagttaatttctggtgtggtcttgagtaaggtaccccacctttatctgtaaccatctagtcaggtgatctctttagccattccagtgcccgggctctattagagttagttctaaggcattcatacttcttgcttagggcgtttctgtctttgatccctcatccccaggtgctagtgtatgagttgttgggaaagggctttcgagggggtgggggccaatggaaggctctgttgggacggcaccaggcgaggtgttgagttggctcggctcaaggttcttcggggtgtgagctggcatgaggacctgttggaagtgggatccaggcctggtccagcctcccagctgcctcgatttgtgcgtgtgaacactctcaagacctgctccgtttatgtagttatttcaagagac

SEQ ID NO: 2365 - DNA, 902 bp, Artificial
  cDNA Sequence
taaaggcgcgcgggaacatggggctgtacgctgcggtggcaggcgtgctggccggcgtggagagccgccagggctctatcaaggggctggtgtactccagcaacttccagcctcgatgacttacgagccctcaaggggaagcattttctcctggaccccttgatgccggagctgctggtgtttcccgcccagacagatctgcatgaacacccactgtaccgggccggacacctcattctgcaggacagggccagctgtctcccagccatgctgctggacccccgccaggctcccatgtcatggatgcctgtgccaccccaggcaataaagaccagtcacttggctgctcttctgaagaaccaaggcggctcgtctactccatgtgctccctctgccaggaggagaatgaagacatggtacaagatgcgctgcagcagaacccgggcgccttcaggctagctcccgccctgcctgcccggccccaccgaggcctgagcacgttcccgggtgccgagcactgcctccgggcttcccccaagaccacgcttagcggtggcttcttcgttgctgtaattgaacgggtcgagatgccgacctcagcctcacaggccaaagcatcagcaccagaacgcacacccagcccagccccaaagagaaagaagagagcaaaaagctgcagccggtgcttgcacaccgccttgcacatagcagaggctccgggctcactccttcctggtgggaaaggaagatgcctgtcctctccgtggaagaccctgggccctcaccgcaggcagcagtttgcgttttgaaaggttattgggtcccttcctcgggctgtgttcttgctggtgagcaaaagtgttgcctgcagaaataaaatgcagaacgtactctacgataga

SEQ ID NO: 2366 - DNA, 1005 bp, Artificial
  cDNA Sequence
ggggctgtacgctgcggtggcaggcgtgctggccggcgtggagagccgccagggctctatcaaggggctggtgtactccagcaacttccagcctcgatgacttacgagccctcaaggggaagcattttctcctggaccccttgatgccggagctgctggtgtttcccgcccagacagatctgcatgaacacccactgtaccgggccggacacctcattctgcaggacagggccagctgtctcccagccatgctgctggacccccgccaggctcccatgtcatggatgcctgtgccaccccaggcaataaagaccagtcacttggctgctcttctgaagaaccaagggtatgccgagcagacagctggaggagcccggggcagggacacctagcccggtgcgtctgcatgccctggcagggttccagcagcgagccctgtgccacgcgctcactttcccttccctgcagcggctcgtctactccatgtgctccctctgccaggaggagaatgaagacatggtacaagatgcgctgcagcagaacccgggcgccttcaggctagctcccgccctgcctgcccggccccaccgaggcctgagcacgttcccgggtgccgagcactgcctccgggcttcccccaagaccacgcttagcggtggcttcttcgttgctgtaattgaacgggtcgagatgccgacctcagcctcacaggccaaagcatcagcaccagaacgcacacccagcccagccccaaagagaaagaagagagcaaaaagctgcagccggtgcttgcacaccgccttgcacatagcagaggctccgggctcactccttcctggtgggaaaggaagatgcctgtcctctccgtggaagaccctgggccctcaccgcaggcagcagtttgcgttttgaaaggttattgggtcccttcctcgggctgtgttcttgctggtgagcaaaagtgttgcctgcagaaataaaatgcagaacgtactctacgataga

SEQ ID NO: 2367 - DNA, 1068 bp, Artificial
  cDNA Sequence
ggggctgtacgctgcggtggcaggcgtgctggccggcgtggagagccgccagggctctatcaaggggctggtgtactccagcaacttccagcctcgatgacttacgagccctcaaggggaagcattttctcctggaccccttgatgccggagctgctggtgtttcccgcccagacagatctgcatgaacacccactgtaccgggccggacacctcattctgcaggacagggccagctgtctcccagccatgctgctggacccccgccaggctcccatgtcatggatgcctgtgccaccccaggcaataaagaccagtcacttggctgctcttctgaagaaccaagggtatgccgagcagacagctggaggagcccggggcagggacacctagcccggtgcgtctgcatgccctggcagggttccagcagcgagccctgtgccacgcgctcactttcccttccctgcagcggctcgtctactccatgtgctccctctgccaggaggagaatgaagacatggtacaagatgcgctgcagcagaacccgggcgccttcaggctagctcccgccctgcctgcccggccccaccgaggcctgagcacgttcccgggtgccgagcactgcctccgggcttcccccaagaccacgcttagcggtggcttcttcgttgctgtaattgaacgggtcgagatgccgacgtgagtgagtgggggcatgcttgggaggcgcaggatggtactggcacatctaacatctacatttctctagctcagcctcacaggccaaagcatcagcaccagaacgcacacccagcccagccccaaagagaaagaagagagcaaaaagctgcagccggtgcttgcacaccgccttgcacatagcagaggctccgggctcactccttcctggtgggaaaggaagatgcctgtcctctccgtggaagaccctgggccctcaccgcaggcagcagtttgcgttttgaaaggttattgggtcccttcctcgggctgtgttcttgctggtgagcaaaagtgttgcctgcagaaataaaatgcagaacgtactcta

SEQ ID NO: 2368 - DNA, 367 bp, Artificial
  cDNA Sequence
ggggctgtacgctgcggtggcaggcgtgctggccggcgtggagagccgccagggctctatcaaggggctggtgtactccagcaacttccagcctcgatgacttacgagccctcaaggggaagcattttctcctggaccccttgatgccggagctgctggtgtttcccgcccagacagatctgcatgaacacccactgtaccgggccggacacctcattctgcaggacagggccagctgtctcccagccatgctgctggacccccgccaggctcccatgtcatggatgcctgtgccaccccaggcaataaagaccagtcacttggctgctcttctgaagaaccaagggaagatctttgcctttgacct

SEQ ID NO: 2369 - DNA, 1640 bp, Artificial
  cDNA Sequence
caggcgtgctggccggcgtggagagccgccagggctctatcaaggggctggtgtactccagcaacttccagaacgtgaagcagctgtacgcgctggtgtgcgaaacgcagcgctactccgccgtgctggatgccgtgatctccagcgccggcctcctcagtgcgaagaagctgcagccgcacctggccaagggttatgcttcaacaggaatagctaacatttattaaattgtggcacgtaagtatcttggatatattggctcattgaatcctcacacctactattttacagagatgccagtggggcttgagattgaatcacttgcccaggctcccactgctggtaaacagtagagggggctcctgacccataagtctggcttgacaacccattccctcaactgcggatcccggattcccttatcaccctgttgatttctccatagctgtggtaacatttgttgcatgaatggaccgttgaaatagggcctggcagggagaaattcaggaaatgatgaatgaatggttcttccctggcagcctcgatgacttacgagccctcaaggggaagcattttctcctggaccccttgatgccggagctgctggtgtttcccgcccagacagatctgcatgaacacccactgtaccgggccggacacctcattctgcaggacagggccagctgtctcccagccatgctgctggacccccgccaggctcccatgtcatggatgcctgtgccaccccaggcaataaagaccagtcacttggctgctcttctgaagaaccaagggaagatctttgcctttgacctggatgccaggcggctggcatccatggccacgctgctggcctgggctggcgtctcctgctgtgagctggctgaggaggacttcctggcggtctcccccttagatccgcgctatcgtgaggtccactatgtcctgctggatccttcctgcagtggctcgggtgagatggtatgccgagcagacagctggaggagcccggggcagggacacctagcccggtgcgtctgcatgccctggcagggttccagcagcgagccctgtgccacgcgctcactttcccttccctgcagcggctcgtctactccatgtgctccctctgccaggaggagaatgaagacatggtacaagatgcgctgcagcagaacccgggcgccttcaggctagctcccgccctgcctgcccggccccaccgaggcctgagcacgttcccgggtgccgagcactgcctccgggcttcccccaagaccacgcttagcggtggcttcttcgttgctgtaattgaacgggtcgagatgccgacctcagcctcacaggccaaagcatcagcaccagaacgcacacccagcccagccccaaagagaaagaagagagcaaaaagctgcagccggtgcttgcacaccgccttgcacatagcagaggctccgggctcactccttcctggtgggaaaggaagatgcctgtcctctccgtggaagaccctgggccctcaccgcaggcagcagtttgcgttttgaaaggttattgggtcccttcctcgggctgtgttcttgctggtgagcaaaagtgttgcctgcagaaataaaatgcagaacgtactctacgataga

SEQ ID NO: 2370 - DNA, 1703 bp, Artificial
  cDNA Sequence
caggcgtgctggccggcgtggagagccgccagggctctatcaaggggctggtgtactccagcaacttccagaacgtgaagcagctgtacgcgctggtgtgcgaaacgcagcgctactccgccgtgctggatgccgtgatctccagcgccggcctcctcagtgcgaagaagctgcagccgcacctggccaagggttatgcttcaacaggaatagctaacatttattaaattgtggcacgtaagtatcttggatatattggctcattgaatcctcacacctactattttacagagatgccagtggggcttgagattgaatcacttgcccaggctcccactgctggtaaacagtagagggggctcctgacccataagtctggcttgacaacccattccctcaactgcggatcccggattcccttatcaccctgttgatttctccatagctgtggtaacatttgttgcatgaatggaccgttgaaatagggcctggcagggagaaattcaggaaatgatgaatgaatggttcttccctggcagcctcgatgacttacgagccctcaaggggaagcattttctcctggaccccttgatgccggagctgctggtgtttcccgcccagacagatctgcatgaacacccactgtaccgggccggacacctcattctgcaggacagggccagctgtctcccagccatgctgctggacccccgccaggctcccatgtcatggatgcctgtgccaccccaggcaataaagaccagtcacttggctgctcttctgaagaaccaagggaagatctttgcctttgacctggatgccaggcggctggcatccatggccacgctgctggcctgggctggcgtctcctgctgtgagctggctgaggaggacttcctggcggtctcccccttagatccgcgctatcgtgaggtccactatgtcctgctggatccttcctgcagtggctcgggtgagatggtatgccgagcagacagctggaggagcccggggcagggacacctagcccggtgcgtctgcatgccctggcagggttccagcagcgagccctgtgccacgcgctcactttcccttccctgcagcggctcgtctactccatgtgctccctctgccaggaggagaatgaagacatggtacaagatgcgctgcagcagaacccgggcgccttcaggctagctcccgccctgcctgcccggccccaccgaggcctgagcacgttcccgggtgccgagcactgcctccgggcttcccccaagaccacgcttagcggtggcttcttcgttgctgtaattgaacgggtcgagatgccgacgtgagtgagtgggggcatgcttgggaggcgcaggatggtactggcacatctaacatctacatttctctagctcagcctcacaggccaaagcatcagcaccagaacgcacacccagcccagccccaaagagaaagaagagagcaaaaagctgcagccggtgcttgcacaccgccttgcacatagcagaggctccgggctcactccttcctggtgggaaaggaagatgcctgtcctctccgtggaagaccctgggccctcaccgcaggcagcagtttgcgttttgaaaggttattgggtcccttcctcgggctgtgttcttgctggtgagcaaaagtgttgcctgcagaaataaaatgcagaacgtactcta

SEQ ID NO: 2371 - DNA, 1451 bp, Artificial
  cDNA Sequence
aaggttatgcttcaacaggaatagctaacatttattaaattgtggcacgtaagtatcttggatatattggctcattgaatcctcacacctactattttacagagatgccagtggggcttgagattgaatcacttgcccaggctcccactgctggtaaacagtagagggggctcctgacccataagtctggcttgacaacccattccctcaactgcggatcccggattcccttatcaccctgttgatttctccatagctgtggtaacatttgttgcatgaatggaccgttgaaatagggcctggcagggagaaattcaggaaatgatgaatgaatggttcttccctggcagcctcgatgacttacgagccctcaaggggaagcattttctcctggaccccttgatgccggagctgctggtgtttcccgcccagacagatctgcatgaacacccactgtaccgggccggacacctcattctgcaggacagggccagctgtctcccagccatgctgctggacccccgccaggctcccatgtcatggatgcctgtgccaccccaggcaataaagaccagtcacttggctgctcttctgaagaaccaagggaagatctttgcctttgacctggatgccaggcggctggcatccatggccacgctgctggcctgggctggcgtctcctgctgtgagctggctgaggaggacttcctggcggtctcccccttagatccgcgctatcgtgaggtccactatgtcctgctggatccttcctgcagtggctcgggtgagatggtatgccgagcagacagctggaggagcccggggcagggacacctagcccggtgcgtctgcatgccctggcagggttccagcagcgagccctgtgccacgcgctcactttcccttccctgcagcggctcgtctactccatgtgctccctctgccaggaggagaatgaagacatggtacaagatgcgctgcagcagaacccgggcgccttcaggctagctcccgccctgcctgcccggccccaccgaggcctgagcacgttcccgggtgccgagcactgcctccgggcttcccccaagaccacgcttagcggtggcttcttcgttgctgtaattgaacgggtcgagatgccgacctcagcctcacaggccaaagcatcagcaccagaacgcacacccagcccagccccaaagagaaagaagagagcaaaaagctgcagccggtgcttgcacaccgccttgcacatagcagaggctccgggctcactccttcctggtgggaaaggaagatgcctgtcctctccgtggaagaccctgggccctcaccgcaggcagcagtttgcgttttgaaaggttattgggtcccttcctcgggctgtgttcttgctggtgagcaaaagtgttgcctgcagaaataaaatgcagaacgtactctacgataga

SEQ ID NO: 2372 - DNA, 1514 bp, Artificial
  cDNA Sequence
aaggttatgcttcaacaggaatagctaacatttattaaattgtggcacgtaagtatcttggatatattggctcattgaatcctcacacctactattttacagagatgccagtggggcttgagattgaatcacttgcccaggctcccactgctggtaaacagtagagggggctcctgacccataagtctggcttgacaacccattccctcaactgcggatcccggattcccttatcaccctgttgatttctccatagctgtggtaacatttgttgcatgaatggaccgttgaaatagggcctggcagggagaaattcaggaaatgatgaatgaatggttcttccctggcagcctcgatgacttacgagccctcaaggggaagcattttctcctggaccccttgatgccggagctgctggtgtttcccgcccagacagatctgcatgaacacccactgtaccgggccggacacctcattctgcaggacagggccagctgtctcccagccatgctgctggacccccgccaggctcccatgtcatggatgcctgtgccaccccaggcaataaagaccagtcacttggctgctcttctgaagaaccaagggaagatctttgcctttgacctggatgccaggcggctggcatccatggccacgctgctggcctgggctggcgtctcctgctgtgagctggctgaggaggacttcctggcggtctcccccttagatccgcgctatcgtgaggtccactatgtcctgctggatccttcctgcagtggctcgggtgagatggtatgccgagcagacagctggaggagcccggggcagggacacctagcccggtgcgtctgcatgccctggcagggttccagcagcgagccctgtgccacgcgctcactttcccttccctgcagcggctcgtctactccatgtgctccctctgccaggaggagaatgaagacatggtacaagatgcgctgcagcagaacccgggcgccttcaggctagctcccgccctgcctgcccggccccaccgaggcctgagcacgttcccgggtgccgagcactgcctccgggcttcccccaagaccacgcttagcggtggcttcttcgttgctgtaattgaacgggtcgagatgccgacgtgagtgagtgggggcatgcttgggaggcgcaggatggtactggcacatctaacatctacatttctctagctcagcctcacaggccaaagcatcagcaccagaacgcacacccagcccagccccaaagagaaagaagagagcaaaaagctgcagccggtgcttgcacaccgccttgcacatagcagaggctccgggctcactccttcctggtgggaaaggaagatgcctgtcctctccgtggaagaccctgggccctcaccgcaggcagcagtttgcgttttgaaaggttattgggtcccttcctcgggctgtgttcttgctggtgagcaaaagtgttgcctgcagaaataaaatgcagaacgtactcta

SEQ ID NO: 2373 - DNA, 798 bp, Artificial
  cDNA Sequence
cttagttctgacactttaatgggcttgggaccctggagcaaaagttctcctctgtgaagcgaggatttcaggagcgaggatttcaggactgaggcagcctgtgaagctgtgtaaccgagacacgcttttccttaggtatgccgagcagacagctggaggagcccggggcagggacacctagcccggtgcgtctgcatgccctggcagggttccagcagcgagccctgtgccacgcgctcactttcccttccctgcagcggctcgtctactccatgtgctccctctgccaggaggagaatgaagacatggtacaagatgcgctgcagcagaacccgggcgccttcaggctagctcccgccctgcctgcccggccccaccgaggcctgagcacgttcccgggtgccgagcactgcctccgggcttcccccaagaccacgcttagcggtggcttcttcgttgctgtaattgaacgggtcgagatgccgacgtgactcagcctcacaggccaaagcatcagcaccagaacgcacacccagcccagccccaaagagaaagaagagagcaaaaagctgcagccggtgcttgcacaccgccttgcacatagcagaggctccgggctcactccttcctggtgggaaaggaagatgcctgtcctctccgtggaagaccctgggccctcaccgcaggcagcagtttgcgttttgaaaggttattgggtcccttcctcgggctgtgttcttgctggtgagcaaaagtgttgcctgcagaaataaaatgcagaacgtactctacgataga

SEQ ID NO: 2374 - DNA, 857 bp, Artificial
  cDNA Sequence
cttagttctgacactttaatgggcttgggaccctggagcaaaagttctcctctgtgaagcgaggatttcaggagcgaggatttcaggactgaggcagcctgtgaagctgtgtaaccgagacacgcttttccttaggtatgccgagcagacagctggaggagcccggggcagggacacctagcccggtgcgtctgcatgccctggcagggttccagcagcgagccctgtgccacgcgctcactttcccttccctgcagcggctcgtctactccatgtgctccctctgccaggaggagaatgaagacatggtacaagatgcgctgcagcagaacccgggcgccttcaggctagctcccgccctgcctgcccggccccaccgaggcctgagcacgttcccgggtgccgagcactgcctccgggcttcccccaagaccacgcttagcggtggcttcttcgttgctgtaattgaacgggtcgagatgccgacgtgagtgagtgggggcatgcttgggaggcgcaggatggtactggcacatctaacatctacatttctctagctcagcctcacaggccaaagcatcagcaccagaacgcacacccagcccagccccaaagagaaagaagagagcaaaaagctgcagccggtgcttgcacaccgccttgcacatagcagaggctccgggctcactccttcctggtgggaaaggaagatgcctgtcctctccgtggaagaccctgggccctcaccgcaggcagcagtttgcgttttgaaaggttattgggtcccttcctcgggctgtgttcttgctggtgagcaaaagtgttgcctgcagaaataaaatgcagaacgtactcta

SEQ ID NO: 2375 - DNA, 781 bp, Artificial
  cDNA Sequence
ctttaatgggcttgggaccctggagcaaaagttctcctctgtgaagcgaggatttcaggagcgaggatttcaggactgaggcagcctgtgaagctgtgtaaccgagacacgcttttccttaggtatgccgagcagacagctggaggagcccggggcagggacacctagcccggtgcgtctgcatgccctggcagggttccagcagcgagccctgtgccacgcgctcactttcccttccctgcagcggctcgtctactccatgtgctccctctgccaggaggagaatgaagacatggtacaagatgcgctgcagcagaacccgggcgccttcaggctagctcccgccctgcctgcccggccccaccgaggcctgagcacgttcccgggtgccgagcactgcctccgggcttcccccaagaccacgcttagcggtggcttcttcgttgctgtaattgaacgggtcgagatgccgacctcagcctcacaggccaaagcatcagcaccagaacgcacacccagcccagccccaaagagaaagaagagagcaaaaagctgcagccggtgcttgcacaccgccttgcacatagcagaggctccgggctcactccttcctggtgggaaaggaagatgcctgtcctctccgtggaagaccctgggccctcaccgcaggcagcagtttgcgttttgaaaggttattgggtcccttcctcgggctgtgttcttgctggtgagcaaaagtgttgcctgcagaaataaaatgcagaacgtactctacgataga

SEQ ID NO: 2376 - DNA, 647 bp, Artificial
  cDNA Sequence
atgggcttgggaccctggagcaaaagttctcctctgtgaagcgaggatttcaggagcgaggatttcaggactgaggcagcctgtgaagctgtgtaaccgagacacgcttttccttagcggctcgtctactccatgtgctccctctgccaggaggagaatgaagacatggtacaagatgcgctgcagcagaacccgggcgccttcaggctagctcccgccctgcctgcccggccccaccgaggcctgagcacgttcccgggtgccgagcactgcctccgggcttcccccaagaccacgcttagcggtggcttcttcgttgctgtaattgaacgggtcgagatgccgacctcagcctcacaggccaaagcatcagcaccagaacgcacacccagcccagccccaaagagaaagaagagagcaaaaagctgcagccggtgcttgcacaccgccttgcacatagcagaggctccgggctcactccttcctggtgggaaaggaagatgcctgtcctctccgtggaagaccctgggccctcaccgcaggcagcagtttgcgttttgaaaggttattgggtcccttcctcgggctgtgttcttgctggtgagcaaaagtgttgcctgcagaaataaaatgcagaacgtactcta

SEQ ID NO: 2377 - DNA, 687 bp, Artificial
  cDNA Sequence
gaagcgaggatttcaggagcgaggatttcaggactgaggcagcctgtgaagctgtgtaaccgagacacgcttttccttagcggctcgtctactccatgtgctccctctgccaggaggagaatgaagacatggtacaagatgcgctgcagcagaacccgggcgccttcaggctagctcccgccctgcctgcccggccccaccgaggcctgagcacgttcccgggtgccgagcactgcctccgggcttcccccaagaccacgcttagcggtggcttcttcgttgctgtaattgaacgggtcgagatgccgacgtgagtgagtgggggcatgcttgggaggcgcaggatggtactggcacatctaacatctacatttctctagctcagcctcacaggccaaagcatcagcaccagaacgcacacccagcccagccccaaagagaaagaagagagcaaaaagctgcagccggtgcttgcacaccgccttgcacatagcagaggctccgggctcactccttcctggtgggaaaggaagatgcctgtcctctccgtggaagaccctgggccctcaccgcaggcagcagtttgcgttttgaaaggttattgggtcccttcctcgggctgtgttcttgctggtgagcaaaagtgttgcctgcagaaataaaatgcagaacgtactctacgataga

SEQ ID NO: 2378 - DNA, 453 bp, Artificial
  cDNA Sequence
tgcaggctagctcccgccctgcctgcccggccccaccgaggcctgagcacgttcccgggtgccgagcactgcctccgggcttcccccaagaccacgcttagcggtggcttcttcgttgctgtaattgaacgggtcgagatgccgacctcagcctcacaggccaaagcatcagcaccagaacgcacacccagcccagccccaaagagaaagaagagagcaaaaagctgcagccggtgcttgcacaccgccttgcacatagcagaggctccgggctcactccttcctggtgggaaaggaagatgcctgtcctctccgtggaagaccctgggccctcaccgcaggcagcagtttgcgttttgaaaggttattgggtcccttcctcgggctgtgttcttgctggtgagcaaaagtgttgcctgcagaaataaaatgcagaacgtactctacgataga

SEQ ID NO: 2379 - DNA, 1219 bp, Artificial
  cDNA Sequence
aggcgtccagctgcacttcccacttctgactctgtgcctgctgttccctgctgggaagaagaaaagccagtgatgctggcttgaggccatagtgggaggcccagtggatcctgagaagctagcccgggcagtgagtgtggatggcttggcaggtgagcctgctggagctggaggactggcttcagtgtcccatctgcctggaggtcttcaaggagtccctaatgctacagtgcggccactcctactgcaagggctgcctggtttccctgtcctaccacctggacaccaaggtgcgctgccccatgtgctggcaggtggtggacggcagcagctccttgcccaacgtctccctggcctgggtgatcgaagccctgaggctccctggggacccggagcccaaggtctgcgtgcaccaccggaacccgctcagccttttctgcgagaaggaccaggagctcatctgtggcctctgcggtctgctgggctcccaccaacaccacccggtcacgcccgtctccaccgtctgcagccgcatgaaggaggagctcgcagccctcttctctgagctgaagcaggagcagaagaaggtggatgagctcatcgccaaactggtgaaaaaccggacccgaatcgtcaatgagtcggatgtcttcagctgggtgatccgccgcgagttccaggagctgcgccacccggtggacgaggagaaggcccgctgcctggaggggatagggggtcacacccgtggcctggtggcctccctggacatgcagctggagcaggcccagggaacccgggagcggctggcccaagccgagtgtgtgctggaacagttcggaaatgaggaccaccatgagttcatctggttccactccatggcctccaggtaataaccttggagagagctcagccagggtctggtggctgcgggcacgggcatctcagctccactggttcctccattcagcttaaccagcgcctcccaagcagctgcctatagctggctctataactgagcctggggaagatagaggaaagtcacgtccctgccttcaagggtctcgcagacaggtggggaggcagatggtgaactgtgggtacctagaacagcagaagttcactcaagctacagaaatactagaggagggtagctcatgcctgcaatcccagtactttgggaggccaaggcaggagtattgctggaggccgggagttcgag

SEQ ID NO: 2380 - DNA, 460 bp, Artificial
  cDNA Sequence
cagagccgcagacccacccggccacccctcagcgtctacgcccccgaaacgtctgggccctcacctggccgggggcgtcgtccccttccaggactccctggtttaacgcgcttccccccatgtcctagctgccctccctgtggcgtgagccttcggcctggtgcgccccgctgccctccctggctgtgactctggtggggttccgaaggcccctttatgcccggcagacccctaccgacggcggcattccattctggggccacgaggaggcactcatcgtttcgttccaaccgccgccaacggccctggccctcgcgagctctggaactacagaggccacgcgcccgggcagtgagtgtggatggcttggcaggtgagcctgctggagctggaggactggcttcagtgtcccatctgcctggaggtcttcaaggagtccctaatgctacagtgcggccac

SEQ ID NO: 2381 - DNA, 154 bp, Artificial; identical to SEQ ID NO: 2124
  cDNA Sequence

SEQ ID NO: 2382 - DNA, 434 bp, Artificial
  cDNA Sequence
acccgagggccaggaagaactgctctcagatagccttgttccggaagtatcggttccacttcttttgttccatgcgctgcagggcttgggtttccctggaggagttggaagagatccaggcttatgacccagagcactgggtgtgggcgcgagatcgcgcccacctttcctagagctccagggaccgtggaggcctgaggtcatcggcctgagagaagaacaccggacccaggggagatgtggattttcagcaggaactttattccaatgctaatggcagacatcaggaaggaggagaggaaccatttgtgcagatcatctagaagaacctggaccattcttgacagagctgaatacagtgatcacgttgtcctccaaggagcaggggtggggtggggtacttctaggagtccttggagaaaagtaagaaacca

SEQ ID NO: 2383 - DNA, 228 bp, Artificial; identical to SEQ ID NO: 2220
  cDNA Sequence

SEQ ID NO: 2384 - DNA, 434 bp, Artificial; identical to SEQ ID NO: 2382
  cDNA Sequence

SEQ ID NO: 2385 - DNA, 591 bp, Artificial
  cDNA Sequence
tttatgggtctaatctattcatttattatattaacaaatacatttattatatccagaaatggaaacattgttttacaatccttaaacaagtacccaaaatacttctggatagacacttcaaattcaacacatccttactatctagtatccacatggagaaaacatacattgtatctctcaaattaccaaaatctttggcaataatggtgtcttctttcttgaaaactgaaagcatggccggtgcggtggctcatgcctgtaatcccagcaatttgggacacagaggcaggtggatcacttgagatcaggagtttgagaccagcctggccaacgtccactaggattacaggtgtgagccaccgcaactggccgtcccctatattgcagcacagtgaacaactgtttcctgaacatcacaagctctcttagacactacagtgtataagcaggtctctgtctaaactgctctcctcttgcccctctgcccaaccaatgtctgctcatccaaagaatgtatcccgtgtgttcattaacttagcaagttcccagtaaacagtttaattgatcactcattaagagaaggcgggaaac

SEQ ID NO: 2386 - DNA, 625 bp, Artificial
  cDNA Sequence
aacaatgggacttccacagcaatgggatttccttccgcattcagtttgtgcctttcccatgagcgagagactcctaggagagccgcagcccgttaggaagccatgtgggaactcatccacagactggactctgaaacgggcatgtacagagaagaggagaccccaacacgcttcaagctttgagtggagaggacacagcctctgctgggacagggaacagagggatgcggagaccctgaagatgcttttggacagtggtctgaggttgggacagtggcaggagataccattcacccaggatctccaggacaagagatcagcctggcagttacatgtgttttttttcaaactggttgccaggttggcatgagcgatgacatcagagattccgaccttcctgattggagggaccggactctgtcggcacctgggagttcagttggacaacagtaacttctcagagctgttctccactcctgacttctcccagcctcgagaattgataacacactcttctggatcccagcagtgtccagaagaagaccaaggacagaacagagactaggtttggtgagatgggacagattttgggaaagatcatgatgagccatcaaccgcagcccca

SEQ ID NO: 2387 - DNA, 154 bp, Artificial; identical to SEQ ID NO: 2124
  cDNA Sequence

SEQ ID NO: 2388 - DNA, 229 bp, Artificial
  cDNA Sequence
ccaaggaacccaattgcttgatctggcttcaagcctgggcaacgtggcgagatcccctctccacaaaaatacaaaaattagccaggcgatgtgggaggcatctctactcccaactactcaggaggctgaggcgggaggatcgctggagcctgggaggctggatgaggggagagaggggtatcctggcgagtccccatcttctcaaagggcgtttgtttttccagatcca

SEQ ID NO: 2389 - DNA, 1190 bp, Artificial
  cDNA Sequence
cagagcacaccggactgcgttttttttccgaacgcccgcagcagggtcagaagggaggtggtcgccctccgtcgtggtctggcgtgtattccgagccttggtgtctggcggtttccgagcgttggtgtctggcggtttccgagcgttggtgtcttggcggtttccgaccgttggtgtctggcggtttccgaccgttggtgtctggcacgcgccaccctctcttgctttggttgcgccatgccgatgtaccagacaagaagacaagaaaatgatttgaggacagcttcaatcgcggtgtgaagaagaaagcagcaaaacgaccactgaaaacaacgccggtggcaaaatatccaaagaaagggtcccaagcggtacatcgtcatagccggaaacagtcagagccaccagccaatgatcttttcaatgctgcgaaagctgccaaaagtgacatgcagggatgtccttcctgagatccgtgctatctgcattgaggaaattgggtgttggatgcaaagctacagcacgtctttcctcaccgacagctatttaaaatatattggttggactctgcatgataagcaccgagaagtccgcgtgaagtgcgtgaaggctctgaaagggctgtacggtaaccgggacctgaccgcacgcctggagctcttcactggctgcttcaaggactggatggtttccatgatcatggacagagagtacagtgtggcagtggaggccgtcagattactgatacttatccttaagaacatggaaggggtgctgatggacgtggactgtgagagcgtctaccccattgtgtaggcctctaattgaggcctggcctctgctgtgggtgaatttctgtactggaaacttttctaccctgagtgcgagataagaacgatgggtggaagagagcaacgccagagcccaggtgcccagaggactttcttccagcttctgctgtccttctttgtggagagcaagctccacgaccacgctgcttacttagtagacaacctgtgggactgtgcagggactcagctgaaggactgggagggtctgacaagcctgctgctggagaaggaccagagcacgtgccacatggagccagggccagggaccttccacctcctagggtgaaaccaggagagattgcttgcttcacttgtacaaggcaggaacggtggcatggg

SEQ ID NO: 2390 - DNA, 1190 bp, Artificial; identical to SEQ ID NO: 2389
  cDNA Sequence

SEQ ID NO: 2391 - DNA, 1169 bp, Artificial
  cDNA Sequence
cagagcacaccggactgcgttttttttccgaacgcccgcagcagggtcagaagggaggtggtcgccctccgtcgtggtctggcgtgtattccgagccttggtgtctggcggtttccgagcgttggtgtctggcggtttccgagcgttggtgtcttggcggtttccgaccgttggtgtctggcggtttccgaccgttggtgtctggcacgcgccaccctctcttgctttggttgcgccatgccgatgtaccagacaagaagacaagaaaatgatttgaggacagcttcaatcgcggtgtgaagaagaaagcagcaaaacgaccactgaaaacaacgccggtggcaaaatatccaaagaaagggtcccaagcggtacatcgtcatagccggaaacagtcagagccaccagccaatgatcttttcaatgctgcgaaagctgccaaaagtgacatgcagggatgtccttcctgagatccgtgctatctgcattgaggaaattgggtgttggatgcaaagctacagcacgtctttcctcaccgacagctatttaaaatatattggttggactctgcatgataagcaccgagaagtccgcgtgaagtgcgtgaaggctctgaaagggctgtacggtaaccgggacctgaccgcacgcctggagctcttcactggctgcttcaaggactggatggtttccatgatcatggacagagagtacagtgtggcagtggaggccgtcagattactgatacttatccttaagaacatggaaggggtgctgatggacgtggactgtgagagcgtctaccccattgtgtaggcctctaattgaggcctggcctctgctgtgggtgaatttctgtactggaaacttttctaccctgagtgcgagataagaacgatgggtggaagagagcaacgccagagcccaggtgcccagaggactttcttccagcttctgctgtccttctttgtggagagcaaggtgacatacacagagataactctggctgttgtgcataggacctacaagtgggctggggttggtggttcacgcctgtaagcccaacactttgggaggctgaggtgggaggatcctttgagcccaggagtttgagaccagcttgggcaacatagtgagaccctgtctctaccaaaaaaaaaaaaaaaaaa

SEQ ID NO: 2392 - DNA, 1045 bp, Artificial
  cDNA Sequence
cagagcacaccggactgcgttttttttccgaacgcccgcagcagggtcagaagggaggtggtcgccctccgtcgtggtctggcgtgtattccgagccttggtgtctggcggtttccgagcgttggtgtctggcggtttccgagcgttggtgtcttggcggtttccgaccgttggtgtctggcggtttccgaccgttggtgtctggcacgcgccaccctctcttgctttggttgcgccatgccgatgtaccagacaagaagacaagaaaatgatttgaggacagcttcaatcgcggtgtgaagaagaaagcagcaaaacgaccactgaaaacaacgccggtggcaaaatatccaaagaaagggtcccaagcggtacatcgtcatagccggaaacagtcagagccaccagccaatgatcttttcaatgctgcgaaagctgccaaaagtgacatgcagcaccgagaagtccgcgtgaagtgcgtgaaggctctgaaagggctgtacggtaaccgggacctgaccgcacgcctggagctcttcactggctgcttcaaggactggatggtttccatgatcatggacagagagtacagtgtggcagtggaggccgtcagattactgatacttatccttaagaacatggaaggggtgctgatggacgtggactgtgagagcgtctaccccattgtgtaggcctctaattgaggcctggcctctgctgtgggtgaatttctgtactggaaacttttctaccctgagtgcgagataagaacgatgggtggaagagagcaacgccagagcccaggtgcccagaggactttcttccagcttctgctgtccttctttgtggagagcaaggtgacatacacagagataactctggctgttgtgcataggacctacaagtgggctggggttggtggttcacgcctgtaagcccaacactttgggaggctgaggtgggaggatcctttgagcccaggagtttgagaccagcttgggcaacatagtgagaccctgtctctaccaaaaaaaaaaaaaaaaaa

SEQ ID NO: 2393 - DNA, 1169 bp, Artificial; identical to SEQ ID NO: 2391
  cDNA Sequence

SEQ ID NO: 2394 - DNA, 1045 bp, Artificial
  cDNA Sequence
cagagcacaccggactgcgttttttttccgaacgcccgcagcagggtcagaagggaggtggtcgccctccgtcgtggtctggcgtgtattccgagccttggtgtctggcggtttccgagcgttggtgtctggcggtttccgagcgttggtgtcttggcggtttccgaccgttggtgtctggcggtttccgaccgttggtgtctggcacgcgccaccctctcttgctttggttgcgccatgccgatgtaccagacaagaagacaagaaaatgatttgaggacagcttcaatcgcggtgtgaagaagaaagcagcaaaacgaccactgaaaacaacgccggtggcaaaatatccaaagaaagggtcccaagcggtacatcgtcatagccggaaacagtcagagccaccagccaatgatcttttcaatgctgcgaaagctgccaaaagtgacatgcagggatgtccttcctgagatccgtgctatctgcattgaggaaattgggtgttggatgcaaagctacagcacgtctttcctcaccgacagctatttaaaatatattggttggactctgcatgataagcaccgagaagtccgcgtgaagtgcgtgaaggctctgaaagggctgtacggtaaccgggacctgaccgcacgcctggagctcttcactggctgcttcaaggactggatggtttccatgatcatggacagagagtacagtgtggcagtggaggccgtcagattactgatacttatccttaaacttttctaccctgagtgcgagataagaacgatgggtggaagagagcaacgccagagcccaggtgcccagaggactttcttccagcttctgctgtccttctttgtggagagcaaggtgacatacacagagataactctggctgttgtgcataggacctacaagtgggctggggttggtggttcacgcctgtaagcccaacactttgggaggctgaggtgggaggatcctttgagcccaggagtttgagaccagcttgggcaacatagtgagaccctgtctctaccaa

SEQ ID NO: 2395 - DNA, 1045 bp, Artificial; identical to SEQ ID NO: 2394
  cDNA Sequence

SEQ ID NO: 2396 - DNA, 1045 bp, Artificial; identical to SEQ ID NO: 2394
  cDNA Sequence

SEQ ID NO: 2397 - DNA, 1045 bp, Artificial; identical to SEQ ID NO: 2394
  cDNA Sequence

SEQ ID NO: 2398 - DNA, 967 bp, Artificial
  cDNA Sequence
cagagcacaccggactgcgttttttttccgaacgcccgcagcagggtcagaagggaggtggtcgccctccgtcgtggtctggcgtgtattccgagccttggtgtctggcggtttccgagcgttggtgtctggcggtttccgagcgttggtgtcttggcggtttccgaccgttggtgtctggcggtttccgaccgttggtgtctggcacgcgccaccctctcttgctttggttgcgccatgccgatgtaccagacaagaagacaagaaaatgatttgaggacagcttcaatcgcggtgtgaagaagaaagcagcaaaacgaccactgaaaacaacgccggtggcaaaatatccaaagaaagggtcccaagcggtacatcgtcatagccggaaacagtcagagccaccagccaatgatcttttcaatgctgcgaaagctgccaaaagtgacatgcagggatgtccttcctgagatccgtgctatctgcattgaggaaattgggtgttggatgcaaagctacagcacgtctttcctcaccgacagctatttaaaatatattggttggactctgcatgataagcaccgagaagtccgcgtgaagtgcgtgaaggctctgaaagggctgtacggtaaccgggacctgaccgcacgcctggagctcttcactggctgcttcaaggactggatggtttccatgatcatggacagagagtacagtgtggcagtggaggccgtcagattactgatacttatccttaagtgagtcctgggaagaggggaggccagtgtctcagacctttgcccttccagggtcatctccctccacctgtcacagctgactcttccatctgtgcaggttgactgaggtcattcctgagttgcagtatgttgagagggtaatatttctgtcttctctaactccccatactcccttgtcttccactctccatttaggagttttttgtgag

SEQ ID NO: 2399 - DNA, 967 bp, Artificial; identical to SEQ ID NO: 2398
  cDNA Sequence

SEQ ID NO: 2400 - DNA, 679 bp, Artificial
  cDNA Sequence
cagagcacaccggactgcgttttttttccgaacgcccgcagcagggtcagaagggaggtggtcgccctccgtcgtggtctggcgtgtattccgagccttggtgtctggcggtttccgagcgttggtgtctggcggtttccgagcgttggtgtcttggcggtttccgaccgttggtgtctggcggtttccgaccgttggtgtctggcacgcgccaccctctcttgctttggttgcgccatgccgatgtaccagacaagaagacaagaaaatgatttgaggacagcttcaatcgcggtgtgaagaagaaagcagcaaaacgaccactgaaaacaacgccggtggcaaaatatccaaagaaagggtcccaagcggtacatcgtcatagccggaaacagtcagagccaccagccaatgatcttttcaatgctgcgaaagctgccaaaagtgacatgcagggatgtccttcctgagatccgtgctatctgcattgaggaaattgggtgttggatgcaaagctacagcacgtctttcctcaccgacagctatttaaaatatattggttggactctgcatgataagcaccgagaagtccgcgtgaagtgcgtgaaggctctgaaagggctgtacggtaaccgggacctgaccgcacgcctggagctcttcactggctgcttcaagg

SEQ ID NO: 2401 - DNA, 679 bp, Artificial; identical to SEQ ID NO: 2400
  cDNA Sequence

SEQ ID NO: 2402 - DNA, 1285 bp, Artificial
  cDNA Sequence
tttttccgaacgcccgcagcagggtcagaagggaggtggtcgccctccgtcgtggtctggcgtgtattccgagccttggtgtctggcggtttccgagcgttggtgtctggcggtttccgagcgttggtgtcttggcggtttccgaccgttggtgtctggcggtttccgaccgttggtgtctggcacgcgccaccctctcttgctttggttgcgccatgccgatgtaccaggtaaagccctatcaccgggtctgcgcccctctccgtgtggagcccacctgcatgtactggctccccaacatgcacggcaggagcggcggcccagcacttggcactggccacttgcagacaagaagacaagaaaatgatttgaggacagcttcaatcgcggtgtgaagaagaaagcagcaaaacgaccactgaaaacaacgccggtggcaaaatatccaaagaaagggtcccaagcggtacatcgtcatagccggaaacagtcagagccaccagccaatgatcttttcaatgctgcgaaagctgccaaaagtgacatgcagggatgtccttcctgagatccgtgctatctgcattgaggaaattgggtgttggatgcaaagctacagcacgtctttcctcaccgacagctatttaaaatatattggttggactctgcatgataagcaccgagaagtccgcgtgaagtgcgtgaaggctctgaaagggctgtacggtaaccgggacctgaccgcacgcctggagctcttcactggctgcttcaaggactggatggtttccatgatcatggacagagagtacagtgtggcagtggaggccgtcagattactgatacttatccttaagaacatggaaggggtgctgatggacgtggactgtgagagcgtctaccccattgtgtaggcctctaattgaggcctggcctctgctgtgggtgaatttctgtactggaaacttttctaccctgagtgcgagataagaacgatgggtggaagagagcaacgccagagcccaggtgcccagaggactttcttccagcttctgctgtccttctttgtggagagcaagctccacgaccacgctgcttacttagtagacaacctgtgggactgtgcagggactcagctgaaggactgggagggtctgacaagcctgctgctggagaaggaccagagcacgtgccacatggagccagggccagggaccttccacctcctagggtgaaaccaggagagattgcttgcttcacttgtacaaggcaggaacggtggcatggg

SEQ ID NO: 2403 - DNA, 1285 bp, Artificial; identical to SEQ ID NO: 2402
  cDNA Sequence

SEQ ID NO: 2404 - DNA, 1264 bp, Artificial
  cDNA Sequence
tttttccgaacgcccgcagcagggtcagaagggaggtggtcgccctccgtcgtggtctggcgtgtattccgagccttggtgtctggcggtttccgagcgttggtgtctggcggtttccgagcgttggtgtcttggcggtttccgaccgttggtgtctggcggtttccgaccgttggtgtctggcacgcgccaccctctcttgctttggttgcgccatgccgatgtaccaggtaaagccctatcaccgggtctgcgcccctctccgtgtggagcccacctgcatgtactggctccccaacatgcacggcaggagcggcggcccagcacttggcactggccacttgcagacaagaagacaagaaaatgatttgaggacagcttcaatcgcggtgtgaagaagaaagcagcaaaacgaccactgaaaacaacgccggtggcaaaatatccaaagaaagggtcccaagcggtacatcgtcatagccggaaacagtcagagccaccagccaatgatcttttcaatgctgcgaaagctgccaaaagtgacatgcagggatgtccttcctgagatccgtgctatctgcattgaggaaattgggtgttggatgcaaagctacagcacgtctttcctcaccgacagctatttaaaatatattggttggactctgcatgataagcaccgagaagtccgcgtgaagtgcgtgaaggctctgaaagggctgtacggtaaccgggacctgaccgcacgcctggagctcttcactggctgcttcaaggactggatggtttccatgatcatggacagagagtacagtgtggcagtggaggccgtcagattactgatacttatccttaagaacatggaaggggtgctgatggacgtggactgtgagagcgtctaccccattgtgtaggcctctaattgaggcctggcctctgctgtgggtgaatttctgtactggaaacttttctaccctgagtgcgagataagaacgatgggtggaagagagcaacgccagagcccaggtgcccagaggactttcttccagcttctgctgtccttctttgtggagagcaaggtgacatacacagagataactctggctgttgtgcataggacctacaagtgggctggggttggtggttcacgcctgtaagcccaacactttgggaggctgaggtgggaggatcctttgagcccaggagtttgagaccagcttgggcaacatagtgagaccctgtctctaccaaaaaaaaaaaaaaaaaa

SEQ ID NO: 2405 - DNA, 1140 bp, Artificial
  cDNA Sequence
tttttccgaacgcccgcagcagggtcagaagggaggtggtcgccctccgtcgtggtctggcgtgtattccgagccttggtgtctggcggtttccgagcgttggtgtctggcggtttccgagcgttggtgtcttggcggtttccgaccgttggtgtctggcggtttccgaccgttggtgtctggcacgcgccaccctctcttgctttggttgcgccatgccgatgtaccaggtaaagccctatcaccgggtctgcgcccctctccgtgtggagcccacctgcatgtactggctccccaacatgcacggcaggagcggcggcccagcacttggcactggccacttgcagacaagaagacaagaaaatgatttgaggacagcttcaatcgcggtgtgaagaagaaagcagcaaaacgaccactgaaaacaacgccggtggcaaaatatccaaagaaagggtcccaagcggtacatcgtcatagccggaaacagtcagagccaccagccaatgatcttttcaatgctgcgaaagctgccaaaagtgacatgcagcaccgagaagtccgcgtgaagtgcgtgaaggctctgaaagggctgtacggtaaccgggacctgaccgcacgcctggagctcttcactggctgcttcaaggactggatggtttccatgatcatggacagagagtacagtgtggcagtggaggccgtcagattactgatacttatccttaagaacatggaaggggtgctgatggacgtggactgtgagagcgtctaccccattgtgtaggcctctaattgaggcctggcctctgctgtgggtgaatttctgtactggaaacttttctaccctgagtgcgagataagaacgatgggtggaagagagcaacgccagagcccaggtgcccagaggactttcttccagcttctgctgtccttctttgtggagagcaaggtgacatacacagagataactctggctgttgtgcataggacctacaagtgggctggggttggtggttcacgcctgtaagcccaacactttgggaggctgaggtgggaggatcctttgagcccaggagtttgagaccagcttgggcaacatagtgagaccctgtctctaccaaaaaaaaaaaaaaaaaa

SEQ ID NO: 2406 - DNA, 1140 bp, Artificial
  cDNA Sequence
tttttccgaacgcccgcagcagggtcagaagggaggtggtcgccctccgtcgtggtctggcgtgtattccgagccttggtgtctggcggtttccgagcgttggtgtctggcggtttccgagcgttggtgtcttggcggtttccgaccgttggtgtctggcggtttccgaccgttggtgtctggcacgcgccaccctctcttgctttggttgcgccatgccgatgtaccaggtaaagccctatcaccgggtctgcgcccctctccgtgtggagcccacctgcatgtactggctccccaacatgcacggcaggagcggcggcccagcacttggcactggccacttgcagacaagaagacaagaaaatgatttgaggacagcttcaatcgcggtgtgaagaagaaagcagcaaaacgaccactgaaaacaacgccggtggcaaaatatccaaagaaagggtcccaagcggtacatcgtcatagccggaaacagtcagagccaccagccaatgatcttttcaatgctgcgaaagctgccaaaagtgacatgcagggatgtccttcctgagatccgtgctatctgcattgaggaaattgggtgttggatgcaaagctacagcacgtctttcctcaccgacagctatttaaaatatattggttggactctgcatgataagcaccgagaagtccgcgtgaagtgcgtgaaggctctgaaagggctgtacggtaaccgggacctgaccgcacgcctggagctcttcactggctgcttcaaggactggatggtttccatgatcatggacagagagtacagtgtggcagtggaggccgtcagattactgatacttatccttaaacttttctaccctgagtgcgagataagaacgatgggtggaagagagcaacgccagagcccaggtgcccagaggactttcttccagcttctgctgtccttctttgtggagagcaaggtgacatacacagagataactctggctgttgtgcataggacctacaagtgggctggggttggtggttcacgcctgtaagcccaacactttgggaggctgaggtgggaggatcctttgagcccaggagtttgagaccagcttgggcaacatagtgagaccctgtctctaccaa

SEQ ID NO: 2407 - DNA, 1062 bp, Artificial
  cDNA Sequence
tttttccgaacgcccgcagcagggtcagaagggaggtggtcgccctccgtcgtggtctggcgtgtattccgagccttggtgtctggcggtttccgagcgttggtgtctggcggtttccgagcgttggtgtcttggcggtttccgaccgttggtgtctggcggtttccgaccgttggtgtctggcacgcgccaccctctcttgctttggttgcgccatgccgatgtaccaggtaaagccctatcaccgggtctgcgcccctctccgtgtggagcccacctgcatgtactggctccccaacatgcacggcaggagcggcggcccagcacttggcactggccacttgcagacaagaagacaagaaaatgatttgaggacagcttcaatcgcggtgtgaagaagaaagcagcaaaacgaccactgaaaacaacgccggtggcaaaatatccaaagaaagggtcccaagcggtacatcgtcatagccggaaacagtcagagccaccagccaatgatcttttcaatgctgcgaaagctgccaaaagtgacatgcagggatgtccttcctgagatccgtgctatctgcattgaggaaattgggtgttggatgcaaagctacagcacgtctttcctcaccgacagctatttaaaatatattggttggactctgcatgataagcaccgagaagtccgcgtgaagtgcgtgaaggctctgaaagggctgtacggtaaccgggacctgaccgcacgcctggagctcttcactggctgcttcaaggactggatggtttccatgatcatggacagagagtacagtgtggcagtggaggccgtcagattactgatacttatccttaagtgagtcctgggaagaggggaggccagtgtctcagacctttgcccttccagggtcatctccctccacctgtcacagctgactcttccatctgtgcaggttgactgaggtcattcctgagttgcagtatgttgagagggtaatatttctgtcttctctaactccccatactcccttgtcttccactctccatttaggagttttttgtgag

SEQ ID NO: 2408 - DNA, 676 bp, Artificial
  cDNA Sequence
tttttccgaacgcccgcagcagggtcagaagggaggtggtcgccctccgtcgtggtctggcgtgtattccgagccttggtgtctggcggtttccgagcgttggtgtctggcggtttccgagcgttggtgtcttggcggtttccgaccgttggtgtctggcggtttccgaccgttggtgtctggcacgcgccaccctctcttgctttggttgcgccatgccgatgtaccaggtaaagccctatcaccgggtctgcgcccctctccgtgtggagcccacctgcatgtactggctccccaacatgcacggcaggagcggcggcccagcacttggcactggccacttgcagacaagaagacaagaaaatgatttgaggacagcttcaatcgcggtgtgaagaagaaagcagcaaaacgaccactgaaaacaacgccggtggcaaaatatccaaagaaagggtcccaagcggtacatcgtcatagccggaaacagtcagagccaccagccaatgatcttttcaatgctgcgaaagctgccaaaagtgacatgcagggatgtccttcctgagatccgtgctatctgcattgaggaaattgggtgttggatgcaaagctacagcacgtctttcctcaccgacagctatttaaaatatattggttggactctgcatgataaggt

SEQ ID NO: 2409 - DNA, 485 bp, Artificial
  cDNA Sequence
gcaaagtttggacacaggcaaaacaaaactagtttgatcgtgatgggaaacattagagaaatgcaaagacatgaccatcataattgtcaggagaaggcattggttaggattgggaagcggcaagcagaagcatttagggattggctggcaatgttttacttctcggctgagtgagggttgcatcggtgtttatttgataacacgttctaggggctgggcaagatggctcatgtttgtagtctcagtactttgggaggccaaagatgggaggattgcttgagcccgtgagtttgagaccagcgtgggtgacatagcgagaccctgtctctacaaaaaattaaaaaaaaaaaaaaaaacccagctgctttgaggctgcagtgagctatgaatgagccactgcactccagcctgggcaacagggcaagaccctgtctcaaaaaaaaaaaatttaatttgaacacttctgttttgtgcagttttctctg

SEQ ID NO: 2410 - DNA, 271 bp, Artificial
  cDNA Sequence
gcccacagttctgcagccactcggtacggcgctaacgccgcgaggtagctcggtgcgtctcgcagtaccagtgcgaacctttgggctctccaggtccgagatcctagtctcctgtcggctctgaggaggatggatccttctgcggatacatgggacctctcctcacctttaatatcattatggataaacaggttttacatttatctgggctttgctgttagcattagcctttggatttgtgtccagattgtcatcgagatgcaggtaagtg

SEQ ID NO: 2411 - DNA, 727 bp, Artificial
  cDNA Sequence
agttctgcagccactcggtacggcgctaacgccgcgaggtagctcggtgcgtctcgcagtaccagtgcgaacctttgggctctccaggtccgagatcctagtctcctgtcggctctgaggaggatggatccttctgcggatacatgggacctctcctcacctttaatatcattatggataaacaggttttacatttatctgggctttgctgttagcattagcctttggatttgtgtccagattgtcatcgagatgcagggatttgcaacagttcttgctgaagcagttacgtccctggatctgcctgtggccattattaatctaaaagaatatgatccagatgatcatctgatagaagaggtgactagtaaaaatgtctgtgtcttcctggttgcgacatacactgacggcctaccaaccgaaagtgcagagtggttctgcaaatggttagaggaagcatccattgattttcgatttggcaaaacttacctgaagggtatgagagatgcggtatttggcctgggaaattctgcctatgctagccacttcaacaaggttggcaaaaatgttgacaagtggctctggatgcttggcgtgcatcgtgtgatgagtcgaggggagggcgactgcgacgtggttaaaagcaagcacggcagcattgaggccaacttcagagcatggaagaccaagttcatctcccagctgcaggcacttcagaaaggggaga

SEQ ID NO: 2412 - DNA, 603 bp, Artificial
  cDNA Sequence
agggatttgcaacagttcttgctgaagcagttacgtccctggatctgcctgtggccattattaatctaaaagaatatgatccagatgatcatctgatagaagaggttggcaaaaatgttgacaagtggctctggatgcttggcgtgcatcgtgtgatgagtcgaggggagggcgactgcgacgtggttaaaagcaagcacggcagcattgaggccaacttcagagcatggaagaccaagttcatctcccagctgcaggcacttcagaaaggggagagaaagaagtcctgtggcggccactgcaagaaaggcaaatgtgaatctcaccaacatggctcagaggagagggaggaaggatctcaagagcaggacgaattgcatcacagagacaccaaggaggaagaacccttcgagagctccagtgaagaagagtttggtggtgaggaccatcagagcctaaattccattgttgatgttgaagatttgggcaaaattatggatcacgtgaagaaagaaaagagagaaaaggaacagcaggaagagaagtctggtttgttcaggaacatggggaggaatgaagatggtgaaagaagagctatgataa

SEQ ID NO: 2413 - DNA, 440 bp, Artificial
  cDNA Sequence
ctgtgaatgttagtgtataaaaattttgtagacaaatatttttgtttctcttggacaaacactgtgaggaattgctggatttgtaaacatccatttggacagtttgtcttttttaactggagtaccgggcgtcaaagcagaacgctttgaagaaggaatgacggtaaagcactgtgcattgtccctcgtgggagaaccaataatgtacccagagatcaacaggtttttgaagctactccaccagtgtaaaatctccagcttcctggtcacaaatgcacaatttcctgcggaaatcaggaacctcgagccagttactcagctgtatgtcagtgtggatgccagtaccaaagacagcctgaagaaaatcgaccgcccactcttcaaggatttctggcagcaattccttgacagtttaaaagccttggcagtcaaggtaagaa

SEQ ID NO: 2414 - DNA, 2187 bp, Artificial
  cDNA Sequence
aaaacctctgaaaagtgtgctgcggtccgtgcacagcattagtataacgtgagggctgaatgcagcccattctctggagaacttcctcacacaccgcagcaaagagaagactgaaagacaaacctgggtgcagccagagaggtccagatagatgagcttgtggcatccattccccaagttcagcctagggactccacgtaccccagctgggtctcattgttccagaactgcattagttaagattacccagacttggatttcaaaggaatactttcattgttccgtctgtaacacgaagtaattggggccagctggatgtcaggatgcgtgtggttaccattgtaatcttgctctgcttttgcaaagcggctgagctgcgcaaagcaagcccaggcagtgtgagaagccgagtgaatcatggccgggcgggtggaggccggagaggctccaacccggtcaaacgctacgcaccaggcctcccgtgtgacgtgtacacatatctccatgagaaatacttagattgtcaagaaagaaaattagtttatgtgctgcctggttggcctcaggatttgctgcacatgctgctagcaagaaacaagatccgcacattgaagaacaacatgttttccaagtttaaaaagctgaaaagcctggatctgcagcagaatgagatctctaaaattgagagtgaggcgttctttggtttaaacaaactcaccaccctcttactgcagcacaaccagatcaaagtcttgacggaggaagtgttcatttacacacctctcttgagctacctgcgtctttatgacaacccctggcactgtacttgtgagatagaaacgcttatttcaatgttgcagattcccaggaaccggaatttggggaactacgccaagtgtgaaagtccacaagaacaaaaaaataaaaaactgcggcagataaaatctgaacagttgtgtaatgaagaagaaaaggaacaattggacccgaaaccccaagtgtcagggagacccccagtcatcaagcctgaggtggactcaactttttgccacaattatgtgtttcccatacaaacactggactgcaaaaggaaagagttgaaaaaagtgccaaacaacatccctccagatattgttaaacttgacttgtcatacaataaaatcaaccaacttcgacccaaggaatttgaagatgttcatgagctgaagaaattaaacctcagcagcaatggcattgaattcatcgatcctgggtctttgagatgaaaccctgcaagtagacttacgtgaatgatttttgctgtgccgcttttttagggctcacacatttagaagaattagatttatcaaacaacagtctgcaaaactttgactatggcgtattagaagacttgtattttttgaaactcttgtggctcagagataacccttggagatgtgactacaacattcactacctctactactggttaaagcaccactacaatgtccattttaatggcctggaatgcaaaacgcctgaagaatacaaaggatggtctgtgggaaaatatattagaagttactatgaagaatgccccaaagacaagttaccagcatatcctgagtcatttgaccaagacacagaagatgatgaatgggaaaaaaaacatagagatcacaccgcaaagaagcaaagcgtaataattactatagtaggataaggtagaaattgttctgattgtaattagttttgtattttctatactggtgttagaaaacatatgtttacatttgattaactgtgttgcctatttatgcagggtaatccagctaaaggaagctttctttaattataagtattattgtgactattatagtaatcaagagaatgctatcatcctgcttgcctgtccatttgtggaacagcatctggtgatatgcaattccacactggtaacctgcagcagttgggtcctaatgatggcattagactttcataatgtcctgtataaatgtttttactgcttttagaaaataaagaaaaaaaacttggttcatgtttacatgcctttcgatagctgtttgtgcatacttaaagatgatcaaaatgattttatacaaatgctgttataataaaatgtcattccctacccctctactttttttcagtaagtcatcttatacattaaataaatttccatttctg

SEQ ID NO: 2415 - DNA, 1024 bp, Artificial
  cDNA Sequence
caaacaacatccctccagatattgttaaacttgacttgtcatacaataaaatcaaccaacttcgacccaaggaatttgaagatgttcatgagctgaagaaattaaacctcagcagcaatggcattgaattcatcgatcctgccgcttttttagggctcacacatttagaagaattagatttatcaaacaacagtctgcaaaactttgactatggcgtattagaagacttgtattttttgaaactcttgtggctcagagataacccttggagatgtgactacaacattcactacctctactactggttaaagcaccactacaatgtccattttaatggcctggaatgcaaaacgcctgaagaatacaaaggatggtctgtgggaaaatatattagaagttactatgaagaatgccccaaagacaagttaccagcatatcctgagtcatttgaccaagacacagaagatgatgaatgggaaaaaaaacatagagatcacaccgcaaagaagcaaagcgtaataattactatagtaggataaggtagaaattgttctgattgtaattagttttgtattttctatactggtgttagaaaacatatgtttacatttgattaactgtgttgcctatttatgcagggtaatccagctaaaggaagctttctttaattataagtattattgtgactattatagtaatcaagagaatgctatcatcctgcttgcctgtccatttgtggaacagcatctggtgatatgcaattccacactggtaacctgcagcagttgggtcctaatgatggcattagactttcataatgtcctgtataaatgtttttactgcttttagaaaataaagaaaaaaaacttggttcatgtttacatgcctttcgatagctgtttgtgcatacttaaagatgatcaaaatgattttatacaaatgctgttataataaaatgtcattccctacccctctactttttttcagtaagtcatcttatacattaaataaatttccatttctg

SEQ ID NO: 2416 - DNA, 1472 bp, Artificial
  cDNA Sequence
ccatttcctttctccacatccaggtcaggtggcgtttgctgtggcggctaggcccgcgtgcgctggagacctccgcgctggcccccgcgagcctcctgccctggcccggcgctgcggctctgccgcggcggcagcatgggtggcccccggggcgcgggctgggtggcggcgggcctgctgctcggcgcgggcgcctgctactgcatttacaggctgacccggggtcggcggcggggcgaccgcgagctcgggatacgctcttcgaagtccgcagaagacttaactgatggttcatatgatgatgttctaaatgctgaacaacttcagaaactcctttacctgctggagtcaacggaggatcctgtaattattgaaagagctttgattactttgggtaacaatgcagccttttcagttaaccaagctattattcgtgaattgggtggtattccaattgttgcaaacaaaatcaaccattccaaccagagtattaaagagaaagctttaaatgcactaaataacctgagtgtgaatgttgaaaatcaaatcaagataaagatatacatcagtcaagtatgtgaggatgtcttctctggtcctctgaactctgctgtgcagctggctggactgacattgttgacaaacatgactgttaccaatgaccaccagcacatgcttcacagttacattacagacctgttccaggtgttacttactggaaatggaaacacgaaggtgcaagttttgaaactgcttttgaatttgtctgaaaatccagccatgacagaaggacttctccgtgcccaagtggattcatcattcctttccctttatgacagccacgtagcaaaggagattcttcttcgagtacttacgctatttcagaatataaagaactgcctcaaaatagaaggccatttagctgtgcagcctactttcactgaaggttcattgtttttcctgttacatggagaagaatgtgcccagaaaataagagctttagttgatcaccatgatgcagaggtgaaggaaaaggttgtaacaataatacccaaaatctgattggtcatatttttccaaagagtaatgcagtctggatataaacgtattttctgtcttccttataaggggattctcccagctgctaaatttaaacagtaaatatcacattttgtcattaacacagctataacttgccgtggttctcagatttattttggactattttgatgccaagtgaatataagagcttgtactgaaaccatttatttctttctattttgctatttgcaaatgcttgttatcttccctacatgaagtggcagtaacctttttcacatttaagctacccttctaccttttgaagtgatttgcagttactcatctgagacagcatcagtatttgactaaatcattgtttcacaactgaatagtcttgttcttttagtagcaacgaaatcctaagctcttga

SEQ ID NO: 2417 - DNA, 1110 bp, Artificial
  cDNA Sequence
ccatttcctttctccacatccaggtcaggtggcgtttgctgtggcggctaggcccgcgtgcgctggagacctccgcgctggcccccgcgagcctcctgccctggcccggcgctgcggctctgccgcggcggcagcatgggtggcccccggggcgcgggctgggtggcggcgggcctgctgctcggcgcgggcgcctgctactgcatttacaggctgacccggggtcggcggcggggcgaccgcgagctcgggatacgctcttcgaagtccgcagaagacttaactgatggttcatatgatgatgttctaaatgctgaacaacttcagaaactcctttacctgctggagtcaacggaggatcctgtaattattgaaagagctttgattactttgggtaacaatgcagccttttcagttaaccaagctattattcgtgaattgggtggtattccaattgttgcaaacaaaatcaaccattccaaccagagtattaaagagaaagctttaaatgcactaaataacctgagtgtgaatgttgaaaatcaaatcaagataaaggtaagttgactgaaaatcacaaatgtataaggttttctataaataaaaaataacaaaaagatgagtaatgaaactttagtagactatcctttgtaattttacagccaaggattacctttagaggaatggagaataagacagaagagggagggacctgaactagccaataagaggtacaataagacttttgtttcagtaaaataatgcttgtttattctacaggttatcctctacatcagggacaggcactggtgacagtaatagccttaaggctataggcaccaaccaaatagtgaatatagttggctgaaagttgggacaagactttgcgctagaactagaactagtattacaagagattcattcagggagcatatccgatgctacatattcataaatatggttgttaatgcatacagtttggctagttttgcctttgaaattaagtgtactgtatgagtgtattgcaaagtgttaagtcactgtatgctttagctctttcaatggatgaggcaaatgtgcaaatagattaaactgacttttacagaataa

SEQ ID NO: 2418 - DNA, 1187 bp, Artificial
  cDNA Sequence
atcctctaccttccttctagcagaaatggcggctgcggcggctcgagtggtgttgtcatccgcggcgcggcggcggctctggggtttcagcgagagtcttctaatccgaggcgctgcgggacggtcattatattttggagagaacagattaagaagtacacaggctgctacccaagttgttctgaatgttcctgaaacaagagtaacatgtttagaaagtggactcagagtagcttcggaagactctgggctctcaacatgcacagttggactctggattgatgctggaagtagatacgaaaatgagaagaacaatggaacagcacactttctggagcatatggctttcaaggcaaggcaccaagaagagatcccagttagatctggaacttgagattgaaaatatgggtgctcatctcaatgcctatacctccagagagcagactgtatactatgccaaagcattctctaaagacttgccaagagctgtagaaattcttgctgatataatacaaaacagcacattgggagaagcagagattgaacgtgagcgtggagtaatccttagagagatgcaggaagttgaaaccaatttacaagaagttgtttttgattatcttcatgccacagcttatcaaaatactgcacttggacggacaattttgggaccaactgaaaatatcaaatctataagtcgtaaggacttagtggattatataaccacacattataaggggccaagaatagtgcttgctgctgctggaggtgtttcccatgatgaattgcttgacttagcaaagtttcatttcggtgactctttatgcacacacaaaggagaaataccagctctgcctccctgcaaattcacaggaagtgagattcgtgtgagggatgacaagatgcctttggcgcaccttgcaatagctgttgaagctgttggttgggcacatccagatacaatctgtctcatggttgcaaacacgctgattggcaactgggatcgctcttttgggggaggaatgaatttatctagcaagctggcccagctcacttgtcatggcaatctttgccatagctttcagtctttcaacacttcctacacagatacaggattatggggactgtatatggtttgtgaatcatccactgttgcagacatgctacatgttgttcaaaaagaatggtga

SEQ ID NO: 2419 - DNA, 703 bp, Artificial
  cDNA Sequence
agctgtagaaattcttgctgatataatacaaaacagcacattgggagaagcagagattgaacgtgagcgtggagtaatccttagagagatgcaggaagttgaaaccaatttacaagaagttgtttttgattatcttcatgccacagcttatcaaaatactgcacttggacggacaattttgggaccaactgaaaatatcaaatctataagtcgtaaggacttagtggattatataaccacacattataaggggccaagaatagtgcttgctgctgctggaggtgtttcccatgatgaattgcttgacttagcaaagtttcatttcggtgactctttatgcacacacaaaggagaaataccagctctgcctccctgcaaattcacaggaagtgagattcgtgtgagggatgacaagatgcctttggcgcaccttgcaatagctgttgaagctgttggttgggcacatccagatacaatctgtctcatggttgcaaacacgctgattggcaactgggatcgctcttttgggggaggaatgaatttatctagcaagctggcccagctcacttgtcatggcaatctttgccatagctttcagtctttcaacacttcctacacagatacaggattatggggactgtatatggtttgtgaatcatccactgttgcagacatgctacatgttgttcaaaaagaatggtga

SEQ ID NO: 2420 - DNA, 590 bp, Artificial
  cDNA Sequence
atacatttataataggagtccagctattgctgctgttggtcccattaagcaactaccagattttaaacagatacgcagtaacatgtgttggcttcgtgattaaaatgctcctaatcaagattgtttgaacacatgtatttataaaacagagctagagaaaaataaaaatgaacatgtatatacatttggaaatttgaattaaatactgtatcatactttcaaaggataaaaagactacccctctgaaggttgttttgtattaatggtcagtctttgttctctgagaaattatgttggaagcagcatactttcaaattattaccatgagtataattttaagaatgaaaatgtttacagtattttcagttttattataaaaatgcacacacaacaaagattgtcatttcttggctctacttgcattcagcacttgttcttgagcagctttctttgcttttaccatctcgacaagttcctaggaagggagaaaggtgtgatttaagaagttgcgatttaaaaacagacattttaatctagtgtttggtgtaaagaattcaagcaactaagatagatagtactaaatatactga

SEQ ID NO: 2421 - DNA, 544 bp, Artificial
  cDNA Sequence
gcaaggaaggtgctgtgtaatcattaaggagcggaggcttttggagctgctaaaatgccggattacctcggtgccgatcagcggaagaccaaagaggatgagaaggacgacaagcccatccgagctctggatgagggggatattgccttggtcagagcacttactctaggcagatcaagcaagttgaagatgacattcagcaacttctcaagaaaattaatgagctcactggtattaaagaatctgacactggcctggccccaccagcactctgggatttggctgcagataagcagacactccagagtgaacagcctttacaggttgccaggtgtacaaagataatcaatgctgattcggaggacccaaaatacattatcaacgtaaagcagtttgccaagtttgtggtggaccttagtgatcaggtggcacctactgacattgaagaagggatgagagtgggcgtggatagaaataaatatcaaattcacattccattgcctcctaagattgacccaacagttaccatgatgcaggtaagaaa

SEQ ID NO: 2422 - DNA, 2086 bp, Artificial
  cDNA Sequence
gtaatcattaaggagcggaggcttttggagctgctaaaatgccggattacctcggtgccgatcagcggaagaccaaagaggatgagaaggacgacaagcccatccgagctctggatgagggggatattgccttggtcagagcacttactctaggcagatcaagcaagttgaagatgacattcagcaacttctcaagaaaattaatgagctcactggtattaaagaatctgacactggcctggccccaccagcactctgggatttggctgcagataagcagacactccagagtgaacagcctttacaggttgccaggtgtacaaagataatcaatgctgattcggaggacccaaaatacattatcaacgtaaagcagtttgccaagtttgtggtggaccttagtgatcaggtggcacctactgacattgaagaagggatgagagtgggcgtggatagaaataaatatcaaattcacattccattgcctcctaagattgacccaacagttaccatgatgcaggtggaagagaaacctgatgtcacatacagtgatgttggtggctgtaaggaacagattgagaaactgcgagaagtagttgaaaccccattacttcatccagagaggtttgtgaaccttggcattgagcctcccaagggcgtgctgctctttggtccacccggtacaggcaagacactctgtgcgcgggcagttgctaatcggactgatgcgtgcttcattcgagttattggatctgagcttgtacagaaatacgtcggtgagggggctcgaatggttcgtgaactctttgaaatggccagaacaaaaaaagcctgccttatcttctttgatgaaattgatgctattggaggggctcgttttgatgatggtgctggaggtgacaatgaagtgcagagaacaatgttggaactgatcaatcagcttgatggttttgatcctagaggcaatattaaagtgctgatggccactaacagacctgatactttggatccagcactgatgaggccagggagattggatagaaaaattgaatttagcttgcccgatctagagggtcggacccacatatttaagattcacgctcgttcaatgagtgttgaaagagatatcagatttgaactgttagcacgactgtgtccaaatagcactggtgctgagattagaagcgtctgcacagaggctggtatgtttgccatcagagcacggcgaaaaattgctaccgagaaggatttcttggaagctgtaaataaggtcattaagtcttatgccaaattcagtgctactcctcgttacatgacatacaactgaaccctgaaggctttcaagtgaaaactttaaattggaatcctaaccttatatagacttgttaataaccaattcataaacaaataaatggcttcaaaattgtatgcttttttccatatctcttcttgtaatataataaaaggtgatttctaatgttattaggcagaaaagcttgttagaatatattttgactatttttttgacccacacccgtttaaggatttcacatcatacaaagcgcttgcttagatggcttctatcctaggcatatgctggccgggtgctctacatataaattctcattgtatcctcccatctgtccactgaggaagattatcaaatggatcttcatccaatggatgcataaactttcctacttacttgtagtggcaaagctggctttcaagtacaagtttgttggctccattacctatgctcctattatccgcttctgtcccgcaacaaagtagctcacttaggcgtatgaccacatgcattatgatagtttcccaccaccatattgaataataaaagctttggccaaagcttttttaaagtaggagaaacattggatgtatatgttttgcattgccatttgatttcaaattaatcaggaagaattagtgattttaatgagcagtaaagtggtgcaataaagcagaaagaaaaatgttcagccagaagtgaaagactagtaaaaaaagaaaaaaaaatatttgtacatatgatctaatttagaaagtccagaattggcttcataca

SEQ ID NO: 2423 - DNA, 1915 bp, Artificial
  cDNA Sequence
aatcattaaggagcggaggcttttggagctgctaaaatgccggattacctcggtgccgatcagcggaagaccaaagaggatgagaaggacgacaagcccatccgagctctggatgagggggatattgccttgttgaaaacttatgtgtacaaagataatcaatgctgattcggaggacccaaaatacattatcaacgtaaagcagtttgccaagtttgtggtggaccttagtgatcaggtggcacctactgacattgaagaagggatgagagtgggcgtggatagaaataaatatcaaattcacattccattgcctcctaagattgacccaacagttaccatgatgcaggtggaagagaaacctgatgtcacatacagtgatgttggtggctgtaaggaacagattgagaaactgcgagaagtagttgaaaccccattacttcatccagagaggtttgtgaaccttggcattgagcctcccaagggcgtgctgctctttggtccacccggtacaggcaagacactctgtgcgcgggcagttgctaatcggactgatgcgtgcttcattcgagttattggatctgagcttgtacagaaatacgtcggtgagggggctcgaatggttcgtgaactctttgaaatggccagaacaaaaaaagcctgccttatcttctttgatgaaattgatgctattggaggggctcgttttgatgatggtgctggaggtgacaatgaagtgcagagaacaatgttggaactgatcaatcagcttgatggttttgatcctagaggcaatattaaagtgctgatggccactaacagacctgatactttggatccagcactgatgaggccagggagattggatagaaaaattgaatttagcttgcccgatctagagggtcggacccacatatttaagattcacgctcgttcaatgagtgttgaaagagatatcagatttgaactgttagcacgactgtgtccaaatagcactggtgctgagattagaagcgtctgcacagaggctggtatgtttgccatcagagcacggcgaaaaattgctaccgagaaggatttcttggaagctgtaaataaggtcattaagtcttatgccaaattcagtgctactcctcgttacatgacatacaactgaaccctgaaggctttcaagtgaaaactttaaattggaatcctaaccttatatagacttgttaataaccaattcataaacaaataaatggcttcaaaattgtatgcttttttccatatctcttcttgtaatataataaaaggtgatttctaatgttattaggcagaaaagcttgttagaatatattttgactatttttttgacccacacccgtttaaggatttcacatcatacaaagcgcttgcttagatggcttctatcctaggcatatgctggccgggtgctctacatataaattctcattgtatcctcccatctgtccactgaggaagattatcaaatggatcttcatccaatggatgcataaactttcctacttacttgtagtggcaaagctggctttcaagtacaagtttgttggctccattacctatgctcctattatccgcttctgtcccgcaacaaagtagctcacttaggcgtatgaccacatgcattatgatagtttcccaccaccatattgaataataaaagctttggccaaagcttttttaaagtaggagaaacattggatgtatatgttttgcattgccatttgatttcaaattaatcaggaagaattagtgattttaatgagcagtaaagtggtgcaataaagcagaaagaaaaatgttcagccagaagtgaaagactagtaaaaaaagaaaaaaaaatatttgtacatatgatctaatttagaaagtccagaattggcttcataca

SEQ ID NO: 2424 - DNA, 2078 bp, Artificial
  cDNA Sequence
cttttggagctgctaaaatgccggattacctcggtgccgatcagcggaagaccaaagaggatgagaaggacgacaagcccatccgagctctggatgagggggatattgccttgttgaaaacttatggtcagagcacttactctaggcagatcaagcaagttgaagatgacattcagcaacttctcaagaaaattaatgagctcactggtattaaagaatctgacactggcctggccccaccagcactctgggatttggctgcagataagcagacactccagagtgaacagcctttacaggttgccaggtgtacaaagataatcaatgctgattcggaggacccaaaatacattatcaacgtaaagcagtttgccaagtttgtggtggaccttagtgatcaggtggcacctactgacattgaagaagggatgagagtgggcgtggatagaaataaatatcaaattcacattccattgcctcctaagattgacccaacagttaccatgatgcaggtggaagagaaacctgatgtcacatacagtgatgttggtggctgtaaggaacagattgagaaactgcgagaagtagttgaaaccccattacttcatccagagaggtttgtgaaccttggcattgagcctcccaagggcgtgctgctctttggtccacccggtacaggcaagacactctgtgcgcgggcagttgctaatcggactgatgcgtgcttcattcgagttattggatctgagcttgtacagaaatacgtcggtgagggggctcgaatggttcgtgaactctttgaaatggccagaacaaaaaaagcctgccttatcttctttgatgaaattgatgctattggaggggctcgttttgatgatggtgctggaggtgacaatgaagtgcagagaacaatgttggaactgatcaatcagcttgatggttttgatcctagaggcaatattaaagtgctgatggccactaacagacctgatactttggatccagcactgatgaggccagggagattggatagaaaaattgaatttagcttgcccgatctagagggtcggacccacatatttaagattcacgctcgttcaatgagtgttgaaagagatatcagatttgaactgttagcacgactgtgtccaaatagcactggtgctgagattagaagcgtctgcacagaggctggtatgtttgccatcagagcacggcgaaaaattgctaccgagaaggatttcttggaagctgtaaataaggtcattaagtcttatgccaaattcagtgctactcctcgttacatgacatacaactgaaccctgaaggctttcaagtgaaaactttaaattggaatcctaaccttatatagacttgttaataaccaattcataaacaaataaatggcttcaaaattgtatgcttttttccatatctcttcttgtaatataataaaaggtgatttctaatgttattaggcagaaaagcttgttagaatatattttgactatttttttgacccacacccgtttaaggatttcacatcatacaaagcgcttgcttagatggcttctatcctaggcatatgctggccgggtgctctacatataaattctcattgtatcctcccatctgtccactgaggaagattatcaaatggatcttcatccaatggatgcataaactttcctacttacttgtagtggcaaagctggctttcaagtacaagtttgttggctccattacctatgctcctattatccgcttctgtcccgcaacaaagtagctcacttaggcgtatgaccacatgcattatgatagtttcccaccaccatattgaataataaaagctttggccaaagcttttttaaagtaggagaaacattggatgtatatgttttgcattgccatttgatttcaaattaatcaggaagaattagtgattttaatgagcagtaaagtggtgcaataaagcagaaagaaaaatgttcagccagaagtgaaagactagtaaaaaaagaaaaaaaaatatttgtacatatgatctaatttagaaagtccagaattggcttcataca

SEQ ID NO: 2425 - DNA, 774 bp, Artificial
  cDNA Sequence
cttttggagctgctaaaatgccggattacctcggtgccgatcagcggaagaccaaagaggatgagaaggacgacaagcccatccgagctctggatgagggggatattgccttgttgaaaacttatggtcagagcacttactctaggcagatcaagcaagttgaagatgacattcagcaacttctcaagaaaattaatgagctcactggtattaaagaatctgacactggcctggccccaccagcactctgggatttggctgcagataagcagacactccagagtgaacagcctttacaggttgccaggtgtacaaagataatcaatgctgattcggaggacccaaaatacattatcaacgtaaagcagtttgccaagtttgtggtggaccttagtgatcaggtggcacctactgacattgaagaagggatgagagtgggcgtggatagaaataaatatcaaattcacattccattgcctcctaagattgacccaacagttaccatgatgcaggtggaagagaaacctgatgtcacatacagtgatgttggtggctgtaaggaacagattgagaaactgcgagaagtagttgaaaccccattacttcatccagagaggtttgtgaaccttggcattgagcctcccaagggcgtgctgctctttggtccacccggtacaggcaagacactctgtgcgcgggcagttgctaatcggactgatgcgtgcttcattcgagttattggatctgagcttgtacagaaatacgtcggtgagg

SEQ ID NO: 2426 - DNA, 750 bp, Artificial
  cDNA Sequence
gctaaaatgccggattacctcggtgccgatcagcggaagaccaaagaggatgagaaggacgacaagcccatccgagctctggatgagggggatattgccttggtcagagcacttactctaggcagatcaagcaagttgaagatgacattcagcaacttctcaagaaaattaatgagctcactggtattaaagaatctgacactggcctggccccaccagcactctgggatttggctgcagataagcagacactccagagtgaacagcctttacaggttgccaggtgtacaaagataatcaatgctgattcggaggacccaaaatacattatcaacgtaaagcagtttgccaagtttgtggtggaccttagtgatcaggtggcacctactgacattgaagaagggatgagagtgggcgtggatagaaataaatatcaaattcacattccattgcctcctaagattgacccaacagttaccatgatgcaggtggaagagaaacctgatgtcacatacagtgatgttggtggctgtaaggaacagattgagaaactgcgagaagtagttgaaaccccattacttcatccagagaggtttgtgaaccttggcattgagcctcccaagggcgtgctgctctttggtccacccggtacaggcaagacactctgtgcgcgggcagttgctaatcggactgatgcgtgcttcattcgagttattggatctgagcttgtacagaaatacgtcggtgagg

SEQ ID NO: 2427 - DNA, 1872 bp, Artificial
  cDNA Sequence
ggtattaaagaatctgacactggcctggccccaccagcactctgggatttggctgcagataagcagacactccagagtgaacagcctttacaggttgccaggtgtacaaagataatcaatgctgattcggaggacccaaaatacattatcaacgtaaagcagtttgccaagtttgtggtggaccttagtgatcaggtggcacctactgacattgaagaagggatgagagtgggcgtggatagaaataaatatcaaattcacattccattgcctcctaagattgacccaacagttaccatgatgcaggtggaagagaaacctgatgtcacatacagtgatgttggtggctgtaaggaacagattgagaaactgcgagaagtagttgaaaccccattacttcatccagagaggtttgtgaaccttggcattgagcctcccaagggcgtgctgctctttggtccacccggtacaggcaagacactctgtgcgcgggcagttgctaatcggactgatgcgtgcttcattcgagttattggatctgagcttgtacagaaatacgtcggtgagggggctcgaatggttcgtgaactctttgaaatggccagaacaaaaaaagcctgccttatcttctttgatgaaattgatgctattggaggggctcgttttgatgatggtgctggaggtgacaatgaagtgcagagaacaatgttggaactgatcaatcagcttgatggttttgatcctagaggcaatattaaagtgctgatggccactaacagacctgatactttggatccagcactgatgaggccagggagattggatagaaaaattgaatttagcttgcccgatctagagggtcggacccacatatttaagattcacgctcgttcaatgagtgttgaaagagatatcagatttgaactgttagcacgactgtgtccaaatagcactggtgctgagattagaagcgtctgcacagaggctggtatgtttgccatcagagcacggcgaaaaattgctaccgagaaggatttcttggaagctgtaaataaggtcattaagtcttatgccaaattcagtgctactcctcgttacatgacatacaactgaaccctgaaggctttcaagtgaaaactttaaattggaatcctaaccttatatagacttgttaataaccaattcataaacaaataaatggcttcaaaattgtatgcttttttccatatctcttcttgtaatataataaaaggtgatttctaatgttattaggcagaaaagcttgttagaatatattttgactatttttttgacccacacccgtttaaggatttcacatcatacaaagcgcttgcttagatggcttctatcctaggcatatgctggccgggtgctctacatataaattctcattgtatcctcccatctgtccactgaggaagattatcaaatggatcttcatccaatggatgcataaactttcctacttacttgtagtggcaaagctggctttcaagtacaagtttgttggctccattacctatgctcctattatccgcttctgtcccgcaacaaagtagctcacttaggcgtatgaccacatgcattatgatagtttcccaccaccatattgaataataaaagctttggccaaagcttttttaaagtaggagaaacattggatgtatatgttttgcattgccatttgatttcaaattaatcaggaagaattagtgattttaatgagcagtaaagtggtgcaataaagcagaaagaaaaatgttcagccagaagtgaaagactagtaaaaaaagaaaaaaaaatatttgtacatatgatctaatttagaaagtccagaattggcttcataca

SEQ ID NO: 2428 - DNA, 568 bp, Artificial
  cDNA Sequence
ggtattaaagaatctgacactggcctggccccaccagcactctgggatttggctgcagataagcagacactccagagtgaacagcctttacaggttgccaggtgtacaaagataatcaatgctgattcggaggacccaaaatacattatcaacgtaaagcagtttgccaagtttgtggtggaccttagtgatcaggtggcacctactgacattgaagaagggatgagagtgggcgtggatagaaataaatatcaaattcacattccattgcctcctaagattgacccaacagttaccatgatgcaggtggaagagaaacctgatgtcacatacagtgatgttggtggctgtaaggaacagattgagaaactgcgagaagtagttgaaaccccattacttcatccagagaggtttgtgaaccttggcattgagcctcccaagggcgtgctgctctttggtccacccggtacaggcaagacactctgtgcgcgggcagttgctaatcggactgatgcgtgcttcattcgagttattggatctgagcttgtacagaaatacgtcggtgagg

SEQ ID NO: 2429 - DNA, 568 bp, Artificial; identical to SEQ ID NO: 2428
  cDNA Sequence

SEQ ID NO: 2430 - DNA, 2194 bp, Artificial
  cDNA Sequence
gaaaaacggatttaaagtataaactcaggaaaagaatgaaaacccatttattactgaatttggtgtaagacaagatgaccatctttttgtagggaaaataaaaacgagagcaacttaagatatacaggagcatcactaataataaaggaatacaaactatggaaatcaagaaatcagagaacttcttaatgatgagatatttgggtttaattttccaggagaatgtatttgaaaattttatgacttggctaaagtcgaatggacctttggagttgggtatagaaaaggatctttaacagtgtcccagtttctgtagttctagtttatacctgtatattgcacactcaggatataatctagttagttgaattcattattagtggcttaggttccttattctaatcaagctttttgctgtgttaggtgtacaaagataatcaatgctgattcggaggacccaaaatacattatcaacgtaaagcagtttgccaagtttgtggtggaccttagtgatcaggtggcacctactgacattgaagaagggatgagagtgggcgtggatagaaataaatatcaaattcacattccattgcctcctaagattgacccaacagttaccatgatgcaggtggaagagaaacctgatgtcacatacagtgatgttggtggctgtaaggaacagattgagaaactgcgagaagtagttgaaaccccattacttcatccagagaggtttgtgaaccttggcattgagcctcccaagggcgtgctgctctttggtccacccggtacaggcaagacactctgtgcgcgggcagttgctaatcggactgatgcgtgcttcattcgagttattggatctgagcttgtacagaaatacgtcggtgagggggctcgaatggttcgtgaactctttgaaatggccagaacaaaaaaagcctgccttatcttctttgatgaaattgatgctattggaggggctcgttttgatgatggtgctggaggtgacaatgaagtgcagagaacaatgttggaactgatcaatcagcttgatggttttgatcctagaggcaatattaaagtgctgatggccactaacagacctgatactttggatccagcactgatgaggccagggagattggatagaaaaattgaatttagcttgcccgatctagagggtcggacccacatatttaagattcacgctcgttcaatgagtgttgaaagagatatcagatttgaactgttagcacgactgtgtccaaatagcactggtgctgagattagaagcgtctgcacagaggctggtatgtttgccatcagagcacggcgaaaaattgctaccgagaaggatttcttggaagctgtaaataaggtcattaagtcttatgccaaattcagtgctactcctcgttacatgacatacaactgaaccctgaaggctttcaagtgaaaactttaaattggaatcctaaccttatatagacttgttaataaccaattcataaacaaataaatggcttcaaaattgtatgcttttttccatatctcttcttgtaatataataaaaggtgatttctaatgttattaggcagaaaagcttgttagaatatattttgactatttttttgacccacacccgtttaaggatttcacatcatacaaagcgcttgcttagatggcttctatcctaggcatatgctggccgggtgctctacatataaattctcattgtatcctcccatctgtccactgaggaagattatcaaatggatcttcatccaatggatgcataaactttcctacttacttgtagtggcaaagctggctttcaagtacaagtttgttggctccattacctatgctcctattatccgcttctgtcccgcaacaaagtagctcacttaggcgtatgaccacatgcattatgatagtttcccaccaccatattgaataataaaagctttggccaaagcttttttaaagtaggagaaacattggatgtatatgttttgcattgccatttgatttcaaattaatcaggaagaattagtgattttaatgagcagtaaagtggtgcaataaagcagaaagaaaaatgttcagccagaagtgaaagactagtaaaaaaagaaaaaaaaatatttgtacatatgatctaatttagaaagtccagaattggcttcataca

SEQ ID NO: 2431 - DNA, 890 bp, Artificial
  cDNA Sequence
gaaaaacggatttaaagtataaactcaggaaaagaatgaaaacccatttattactgaatttggtgtaagacaagatgaccatctttttgtagggaaaataaaaacgagagcaacttaagatatacaggagcatcactaataataaaggaatacaaactatggaaatcaagaaatcagagaacttcttaatgatgagatatttgggtttaattttccaggagaatgtatttgaaaattttatgacttggctaaagtcgaatggacctttggagttgggtatagaaaaggatctttaacagtgtcccagtttctgtagttctagtttatacctgtatattgcacactcaggatataatctagttagttgaattcattattagtggcttaggttccttattctaatcaagctttttgctgtgttaggtgtacaaagataatcaatgctgattcggaggacccaaaatacattatcaacgtaaagcagtttgccaagtttgtggtggaccttagtgatcaggtggcacctactgacattgaagaagggatgagagtgggcgtggatagaaataaatatcaaattcacattccattgcctcctaagattgacccaacagttaccatgatgcaggtggaagagaaacctgatgtcacatacagtgatgttggtggctgtaaggaacagattgagaaactgcgagaagtagttgaaaccccattacttcatccagagaggtttgtgaaccttggcattgagcctcccaagggcgtgctgctctttggtccacccggtacaggcaagacactctgtgcgcgggcagttgctaatcggactgatgcgtgcttcattcgagttattggatctgagcttgtacagaaatacgtcggtgagg

SEQ ID NO: 2432 - DNA, 313 bp, Artificial
  cDNA Sequence
accacaggccttaatacaacaacagcttctgtcctccaattttccattgggtcaggttcatgtcgctttagttattcagaccccagcatcatcgtgttatatgccaagaataactctgcggactggattcagctagagaaaattagagccccttccaatgtcagcacaatcatccatatcctctaccttcctgaggacgccaaaggggagaatgtccaatttcagtggaagcaggaaaatcttcgtgtaggtgaagtgtatgaagcctgctgggccttagataacatcttgatcatcaattcagctcacagac

SEQ ID NO: 2433 - DNA, 775 bp, Artificial
  cDNA Sequence
ggttccgtctttggtttctgtggtcatcaatcctgaacttcagactcctgctaccaaattttgtctcaggcaaaagaaccatcaaggacataataggaatgtctgggctgtagactttttccatgtcttgcctgttctcccttctacaatgtctcacatgatacagttttccatcaatctgggatgtggaacgcatcagcctggtaacagtgtcagcttggaattttctaccaaccatgggcgctcctggtccctccttcacactgaatgcttacctgagatctgtgctggaccccacctcccccacagcactgtctactcctctgaaaactacagtgggtggaaccgaataacaattccccttcctaacgcagcactaacccggaacaccaggattcgctggagacaaacaggaccaatccttggaaacatgtgggcaattgataatgtttatattggcccgtcatgtctcaaattctgttctggcagaggacagtgcactagacatggttgcaagtgtgaccctggattttctggcccagcttgtgagatggcatcccagacattcccaatgtttatttctgaaagctttggcagttccaggctctcctcttaccataacttttactctatccgtggtgctgaagtcagctttggttgtggtgtcttggccagtggtaaggccctggttttcaacaaagatgggcggcgtcagctaattacatctttccttgacagctcacaatccaggtttctccagttcacactgagactg

SEQ ID NO: 2434 - DNA, 573 bp, Artificial
  cDNA Sequence
agtcttgactttaccaatcttgtggaggtcactcagtctctgggattctaccttggaaatgttcagccatactgtggccacgactggaccctttggctggagtgcaatggtgcgatctcaactcactgcaacctctgcctcccgggctcaaacgacacattttctatttgatagcctcagatgcttgtttttacagatgttctttcttagtcctggagactttaaagaagataaacgattaaagcaaagaaggtgtaaagatgtagaacaaaatgagatttcttagaattttatgcttctgaacatttaaattgacctgaattgacagtaattcaaactgatcatgtaccgtaaactatatccttcaagtttgtatagaagagttttttcctaacacttctaatataacaaagaatcatatcatgaatgcaagtcctgtatcatgtttattttcataaatagttagcatctgctcagataaatgcaaaagttgctgagcattttaatttaacacttgcattgaatgcatgataacagcagtttaatttctgtgctttgatcaaaaccctaaga

SEQ ID NO: 2435 - DNA, 984 bp, Artificial
  cDNA Sequence
aacttgcctcaagtatgcgctatgtggaaacacaatcaatgcagataggagcatcctatatgattcagttcagtttggtgatgggatgtggccagaaatacaccccacacatggacaaccaggtgaagctggagtactcaaccaaccacggccttacctggcacctcgtccaagaagaatgccttccaagtatgccaagttgtcaggaatttacatcagcaagtatttaccatgccagtgagtttacacagtggaggagagtcatagtgcttcttccccagaaaacttggtccagtgctacccgtttccgctggagccagagctattacacagctcaagacgagtgggctttggacagcatttacattgggcagcagtgccccaacatgtgcagtgggcatggctcatgcgatcatggcatatgcaggtgtgaccaggggtaccaaggcactgaatgccacccagaagctgcccttccgtccacaattatgtcagattttgagaaccagaatggctgggagtctgactggcaagaagttattgggggagaaattgtaaaaccagaacaagggtgtggtgtcatctcttctggatcatctctgtacttcagcaaggctgggaaaagacagctggtgagttgggacctggatacttcttgggtggactttgtccagttctacatccagataggcggagagagtgcttcatgcaacaagcctgacagcagagaggagggcgtcctccttcagtacagcaacaatgggggcatccagtggcacctgctagcagagatgtacttttcagacttcagcaaacccagatttgtctatctggagcttccagctgctgccaagaccccttgcaccaggttccgctggtggcagcccgtgttctcaggggaggactatgaccagtgggcagtcgatgacatcatcattctgtccgagaagcagaagcagatcatcccagttatcaatccaactt

SEQ ID NO: 2436 - DNA, 166 bp, Artificial
  cDNA Sequence
agtgtgaggagatgtgtaatggacaggggagctgtatcaatggaaccaaatgtatatgtgaccctggctactcaggtccaacctgtaaaataagcaccaaaaatcctgattttctcaaagatgatttcgaaggtcagctagaatctgatagattcttattaatgag

SEQ ID NO: 2437 - DNA, 1165 bp, Artificial
  cDNA Sequence
gtgggcaggtacattgccctggagatacccttgaaagcccgttctggttctactcgccttcgctggtggcaaccgtctgagaatgggcacttctacagcccctgggttatcgatcagattcttattggaggaaatatttctggtaatacggtcttggaagatgatttcacaacccttgatagtaggaaatggctgcttcacccaggaggcaccaagatgcccgtgtgtggctctactggtgatgccctggtcttcattgaaaaggccagcacccgttacgtggtcagcacagacgttgccgtgaatgaggattccttcctacagatagacttcgctgcctcctgctcagtcacagactcttgttatgcgattgaattggaatactcagtagatcttggattgtcatggcacccattggtaagggactgtctgcctaccaatgtggaatgcagtcgctatcatctgcaacggatcctggtgtcagacactttcaacaagtggactagaatcactctgcctctccctccttataccaggtcccaagccactcgtttccgttggcatcaaccagctccttttgacaagcagcagacatgggcaatagataatgtctatatcggggatggctgcatagacatgtgcagtggccatgggagatgcatccagggaaactgcgtctgtgatgaacagtggggtggcctgtactgtgatgaccccgagacctctcttccaacccaactcaaagacaacttcaatcgagctccatccagtcagaactggctgactgtgaacggagggaaattgagtacagtgtgtggagccgtggcgtcgggaatggctctccatttcagtggggcgcggtggctcacgcctgtaatcccagcactttgggaggccgaggtgggcagatcacctgaggtcaggagttcaagaccagcctggccaacatggtgaaaccccatcgccattaaaaatacaaaaattagccgggtgtggtagcacacaactgtggtcccagctactcgggaggcggaggcaagagaatcacttgaacccaggagatggaggttgcagtgagccgagactgcaccactgcactccagccagactgtctcaaaaaattaaataataataatcataataaaatggtcatctcaatatgcta

SEQ ID NO: 2438 - DNA, 899 bp, Artificial
  cDNA Sequence
ttccgctggtggcagccaagacatgacggcctggatcagaacgactgggccattgacaatgtcctcatctcaggctctgctgaccaaaggaccgttatgctggacaccttcagcagcgccccagtaccccagcatgagcgctcccctgcagatgccggccctgtcgggaggatcgcctttgacatgtttatggaagacaaaacttcagtgaatgagcactggctattccatgatgattgtacagtagaaagattctgtgactcccctgatggtgtgatgctctgtggcagtcatgatggacgggaggtgtatgcagtgacccatgacctgactcccactgaaggctggattatgcaattcaagatctcagttggatgtaaggtgtctgaaaaaattgcccagaatcaaattcatgtgcagtattctactgacttcggtgtgagttggaattatctggtccctcagtgcttgcctgctgacccaaaatgctctggaagtgtttctcagccatctgtattctttccaactaaagggtggaaaaggatcacctacccacttcctgaaagcttagtgggaaatccggtaaggtttaggttctatcagaagtactcagacatgcagtgggcaatcgataatttctacctgggccctggatgcttggacaactgcaggggccatggagattgcttaagggaacagtgcatctgtgatccgggatactcagggccaaactgctacttgacccacactctgaagactttcctgaaggaacgctttgacagtgaagaaatcaaacctgacttatggatgtccttagaaggtggaagtacttgcactgagtgtggaattcttgccgaggacactgcactctattttgggggatccactgtgagacaagc

SEQ ID NO: 2439 - DNA, 748 bp, Artificial
  cDNA Sequence
ctgcaatactgggggcgcatcggtagtgagaacaacatgacctcttgccatcgtcccatctgccggaaggaaggcgtgctgttggactactctaccgatggaggcatgaattacctggactttgctccatgagatggattaccagaaatacatttctgttagacacgactacatacttcttcctgaagatgccctcaccaacacaactcgacttcgctggtggcagccttttgtgatcagcaatggaattgtggtctctggggtggagcgtgctcagtgggcactggacaacattttgattggtggagcagaaatcaatcccagccaattggtggacacttttgatgatgaaggcacttcccatgaagaaaactggagtttttaccctaatgctgtaaggacagcaggattttgtggcaatccatcctttcacctctattggccaaataaaaagaaggacaagactcacaatgctctctcctcccgagaactcattatacagccaggatacatgatgcagtttaaaattgtggtgggttgtgaagccacttcttgtggtgaccttcattccgtaatgctggaatacactaaggatgcaagatcggattcctggcagctcgtacagacccagtgccttccttcctcttctaacagcattggctgctcccctttccagttccatgaagccaccatctacaactctgtcaacagctcaagctggaaaagaatcaccatccagctgcctgac

SEQ ID NO: 2440 - DNA, 316 bp, Artificial
  cDNA Sequence
gcatctgcgacgagagcttccaaggtgatgactgctctgttttcagtcacgaccttcccagttatattaaagataattttgagtccgcaagagtcaccgaggcaaactgggagaccattcaaggtggagtcataggaagtggctgtgggcagctggccccctacgcccatggagactcactgtactttaatggctgtcagatcaggcaagcagctaccaagcctctggatctcactcgagcaagcaaaatcatgtttgttttgcaaattgggagcatgtcgcagacggacagctgcaacagtgacctgagtggccc

SEQ ID NO: 2441 - DNA, 746 bp, Artificial
  cDNA Sequence
accagccaaaggacttcacacaagctcagagagtgtcttacaatgtccccctggaggcacggatgaaaggagtcttactgcgctggtggcaaccacgccacaatggaacaggtcatgatcaatgggctttggaccatgtggaggtcgtcctcactcgcaaacaaaattacatgatgaatttttcacgacaacatgggctcagacatttctacaacagaagacgaaggtcacttaggcgatacccatgaagaatcaaaaagtttattttttttcttccaacatgtgatgtgttgctctccattcttttaaatctcgcactacatctgatatcaggaaatatctgtgaaggacttggtgattacctgaaagcccttctcaagaccgagtgtacaccactttcccacactgtgaactaatgacaagtgacttatttgctcataagtaaatgtcttcatgttgatgtgtccgtgaaagttgtgatctgttgtaatatcagttacagtggcagtattgacaataagaaacagtttaacagaaaaatgaaatttaagcacaaaaaatttaagagattttatgtttaaaatggcatttagcacagtatttaacattcttggtcacaaagctatttaagtggactgtatttcggctatgtctcatgttttatatgattaaattatcattgtttgtcctttatgtattctcttctacaatacaacacattgaaactgtatttacttgttatgttg

SEQ ID NO: 2442 - DNA, 2196 bp, Artificial
  cDNA Sequence
gtgagactggcctccacaccacgaaagatccatcccggaagtgcttactggtcgtctccatgcgccggttcctgggcgtcttagagccaaggcgcgaggctcggagtgagaggtagagctggaggggaccctaagcgccctccgcccgggacgtgagccgctgcgcccaccgggctagacccggcgccatcatgctgcttctgccaagcgccgcggacggccggggcaccgccatcacccacgctctgacctctgcctctacactctgtcaagttgaacctgtgggaagatggtttgaagcttttgttaagaggagaaacagaaatgcttctgcctcttttcaggaactggaggataagaaagagttatccgaggaatcagaagatgaagaattgcagttggaagagtttcccatgctgaaaacacttgatcccaaagactggaagaaccaagatcattatgcagttcttggacttggccatgtgagatacaaggctacacagagacagatcaaagcagctcataaagcaatggttttaaaacatcacccagacaaacggaaagcagctggtgaaccaataaaagaaggagataatgactacttcacttgcataactaaaggatccccaggtgattcttatcagaagctcatcctacagttaattcatcttatgaaatgttatctgatccagtgaaaagacgagcatttaacagtgtagatcctacttttgataactcagttccttctaaaagtgaagcaaaggataatttcttcgaagtgtttaccccagtgtttgaaaggaattccagatggtcaaataaaaaaaatgttcctaaacttggtgatatgaattcatcatttgaagatgtagatatattttattctttctggtataattttgattcttggagagaattttcttatttagatgaagaagaaaaagaaaaagcagaatgtcgtgatgagaggagatggattgaaaagcagaacagagcaacaagagcacaaagaaaaaaagaagaaatgaacagaataagaacattagttgacaatgcatacagctgtgatccaaggataaaaaagttcaaggaagaagaaaaagccaagaaagaagcagaaaagaaagcaaaagcagaagctaaacggaaggagcaagaagctaaagaaaaacaaagacaagctgaattagaagctgctcggttagctaaggagaaagaagaggaggaagtcagacagcaagcattgctggcaaagaaggaaaaagatatccagaaaaaagccattaagaaggaaaggcaaaaacttcgaaactcatgcaagacctggaatcatttttctgataatgaggcagagcgggttaaaatgatggaagaagtggaaaaactttgtgatcggcttgaactggcaagcttacagtgcttgaatgaaacactcacatcatgcacaaaagaagtaggaaaggctgctttggaaaaacagatagaagaaataaatgagcaaatcagaaaagagaaagaggaagctgaggctcgtatgcgacaagcatctaagaacacagagaaatcaactggtggaggtggaaatggaagtaaaaattggtcagaagatgatctacaattactaattaaagctgtgaatctgttccctgctggaacaaattcaagatgggaagttattgctaattacatgaacatacattcttcctctggagtcaaaagaactgccaaagatgttattggcaaagcaaagagtctccaaaaacttgaccctcatcaaaaagatgacataaataaaaaggcatttgataagttcaaaaaagaacatggagtggtacctcaagcagacaacgcaacgccttcagaacgatttgaaggtccatatacagacttcaccccttggacaacagaagaacagaagcttttggaacaagctttgaaaacatacccagtaaatacacctgaaagatgggaaaaaatagcagaagcggtgcctggcaggacaaagaaggactgcatgaaacgatacaaggaacttgtcgagatggtaaaagcaaagaaagctgctcaagaacaagtgctgaatgcaagtagagccaagaaatgacaatctttgttgtgtgtgcatttttataataaaactgaaaatactgtaaacattttcattcttaaaattatactcatggtaataatttgaaa

SEQ ID NO: 2443 - DNA, 2266 bp, Artificial
  cDNA Sequence
gtgagactggcctccacaccacgaaagatccatcccggaagtgcttactggtcgtctccatgcgccggttcctgggcgtcttagagccaaggcgcgaggctcggagtgagaggtagagctggaggggaccctaagcgccctccgcccgggacgtgagccgctgcgcccaccgggctagacccggcgccatcatgctgcttctgccaagcgccgcggacggccggggcaccgccatcacccacgctctgacctctgcctctacactctgtcaagttgaacctgtgggaagatggtttgaagcttttgttaagaggagaaacagaaatgcttctgcctcttttcaggaactggaggataagaaagagttatccgaggaatcagaagatgaagaattgcagttggaagagtttcccatgctgaaaacacttgatcccaaagactggaagaaccaagatcattatgcagttcttggacttggccatgtgagatacaaggctacacagagacagatcaaagcagctcataaagcaatggttttaaaacatcacccagacaaacggaaagcagctggtgaaccaataaaagaaggagataatgactacttcacttgcataactaaaggatccccaggtgattcttatcagaagctcatcctacagttaattcatcttatgaaatgttatctgatccagtgaaaagacgagcatttaacagtgtagatcctacttttgataactcagttccttctaaaagtgaagcaaaggataatttcttcgaagtgtttaccccagtgtttgaaaggaattccagatggtcaaataaaaaaaatgttcctaaacttggtgatatgaattcatcatttgaagatgtagatatattttattctttctggtataattttgattcttggagagaattttcttatttagatgaagaagaaaaagaaaaagcagaatgtcgtgatgagaggagatggattgaaaagcagaacagagcaacaagagcacaaagaaaaaaagaagaaatgaacagaataagaacattagttggtaagtagaattgatttaagtcccctaaatgttagaaattcaaaatgagattaactttttcttttgctagacaatgcatacagctgtgatccaaggataaaaaagttcaaggaagaagaaaaagccaagaaagaagcagaaaagaaagcaaaagcagaagctaaacggaaggagcaagaagctaaagaaaaacaaagacaagctgaattagaagctgctcggttagctaaggagaaagaagaggaggaagtcagacagcaagcattgctggcaaagaaggaaaaagatatccagaaaaaagccattaagaaggaaaggcaaaaacttcgaaactcatgcaagacctggaatcatttttctgataatgaggcagagcgggttaaaatgatggaagaagtggaaaaactttgtgatcggcttgaactggcaagcttacagtgcttgaatgaaacactcacatcatgcacaaaagaagtaggaaaggctgctttggaaaaacagatagaagaaataaatgagcaaatcagaaaagagaaagaggaagctgaggctcgtatgcgacaagcatctaagaacacagagaaatcaactggtggaggtggaaatggaagtaaaaattggtcagaagatgatctacaattactaattaaagctgtgaatctgttccctgctggaacaaattcaagatgggaagttattgctaattacatgaacatacattcttcctctggagtcaaaagaactgccaaagatgttattggcaaagcaaagagtctccaaaaacttgaccctcatcaaaaagatgacataaataaaaaggcatttgataagttcaaaaaagaacatggagtggtacctcaagcagacaacgcaacgccttcagaacgatttgaaggtccatatacagacttcaccccttggacaacagaagaacagaagcttttggaacaagctttgaaaacatacccagtaaatacacctgaaagatgggaaaaaatagcagaagcggtgcctggcaggacaaagaaggactgcatgaaacgatacaaggaacttgtcgagatggtaaaagcaaagaaagctgctcaagaacaagtgctgaatgcaagtagagccaagaaatgacaatctttgttgtgtgtgcatttttataataaaactgaaaatactgtaaacattttcattcttaaaattatactcatggtaataatttgaaa

SEQ ID NO: 2444 - DNA, 2022 bp, Artificial
  cDNA Sequence
gtgagactggcctccacaccacgaaagatccatcccggaagtgcttactggtcgtctccatgcgccggttcctgggcgtcttagagccaaggcgcgaggctcggagtgagaggtagagctggaggggaccctaagcgccctccgcccgggacgtgagccgctgcgcccaccgggctagacccggcgccatcatgctgcttctgccaagcgccgcggacggccggggcaccgccatcacccacgctctgacctctgcctctacactctgtcaagttgaacctgtgggaagatggtttgaagcttttgttaagaggagaaacagaaatgcttctgcctcttttcaggaactggaggataagaaagagttatccgaggaatcagaagatgaagaattgcagttggaagagtttcccatgctgaaaacacttgatcccaaagactggaagaaccaagatcattatgcagttcttggacttggccatgtgagatacaaggctacacagagacagatcaaagcagctcataaagcaatggttttaaaacatcacccagacaaacggaaagcagctggtgaaccaataaaagaaggagataatgactacttcacttgcataactaaaggatccccaggtgattcttatcagaagctcatcctacagttaattcatcttatgaaatgttatctgatccagtgaaaagacgagcatttaacagtgtagatcctacttttgataactcagttccttctaaaagtgaagcaaaggataatttcttcgaagtgtttaccccagtgtttgaaaggaattccagatggtcaaataaaaaaaatgttcctaaacttggtgatatgaattcatcatttgaagatgtagatatattttattctttctggtataattttgattcttggagagaattttcttatttagatgaagaagaaaaagaaaaagcagaatgtcgtgatgagaggagatggattgaaaagcagaacagagcaacaagagcacaaagaaaaaaagaagaaatgaacagaataagaacattagttgacaatgcatacagctgtgatccaaggataaaaaagttcaaggaagaagaaaaagccaagaaagaagcagaaaagaaagcaaaagcagaagctaaacggaaggagcaagaagctaaagaaaaacaaagacaagctgaattagaagctgctcggttagctaaggagaaagaagaggaggaagtcagacagcaagcattgctggcaaagaaggaaaaagatatccagaaaaaagccattaagaaggaaaggcaaaaacttcgaaactcatgcaagacctggaatcatttttctgataatgaggcagagcgggttaaaatgatggaagaagtggaaaaactttgtgatcggcttgaactggcaaggtatacctatggaactgctattgaagtcttcacttgagcttaggataaagtttcatttcttctttttttttctttagcttacagtgcttgaatgaaacactcacatcatgcacaaaagaagtaggaaaggctgctttggaaaaacagatagaagaaataaatgagcaaatcagaaaagagaaagaggaagctgaggctcgtatgcgacaagcatctaagaacacagagaaatcaactggtggaggtggaaatggaagtaaaaattggtcagaagatgatctacaattactaattaaagctgtgaatctgttccctgctggaacaaattcaaggtactggttttaatgaaacttttcttcaactcacactggagcctggagataatgtagacagactccaaatagcagcacttgttatcacagaaacttgcagagataaattctgtgccacagcagaaaagttacacatgcacatatacatatgacagaatacttgtttctcaggaaattgaagatcatgagacaagtcttgatttatgttggcttactctgtcatggcttgttctagggattaggttttctgtagtttttcttttacagtcttgctctttgt

SEQ ID NO: 2445 - DNA, 2092 bp, Artificial
  cDNA Sequence
gtgagactggcctccacaccacgaaagatccatcccggaagtgcttactggtcgtctccatgcgccggttcctgggcgtcttagagccaaggcgcgaggctcggagtgagaggtagagctggaggggaccctaagcgccctccgcccgggacgtgagccgctgcgcccaccgggctagacccggcgccatcatgctgcttctgccaagcgccgcggacggccggggcaccgccatcacccacgctctgacctctgcctctacactctgtcaagttgaacctgtgggaagatggtttgaagcttttgttaagaggagaaacagaaatgcttctgcctcttttcaggaactggaggataagaaagagttatccgaggaatcagaagatgaagaattgcagttggaagagtttcccatgctgaaaacacttgatcccaaagactggaagaaccaagatcattatgcagttcttggacttggccatgtgagatacaaggctacacagagacagatcaaagcagctcataaagcaatggttttaaaacatcacccagacaaacggaaagcagctggtgaaccaataaaagaaggagataatgactacttcacttgcataactaaaggatccccaggtgattcttatcagaagctcatcctacagttaattcatcttatgaaatgttatctgatccagtgaaaagacgagcatttaacagtgtagatcctacttttgataactcagttccttctaaaagtgaagcaaaggataatttcttcgaagtgtttaccccagtgtttgaaaggaattccagatggtcaaataaaaaaaatgttcctaaacttggtgatatgaattcatcatttgaagatgtagatatattttattctttctggtataattttgattcttggagagaattttcttatttagatgaagaagaaaaagaaaaagcagaatgtcgtgatgagaggagatggattgaaaagcagaacagagcaacaagagcacaaagaaaaaaagaagaaatgaacagaataagaacattagttggtaagtagaattgatttaagtcccctaaatgttagaaattcaaaatgagattaactttttcttttgctagacaatgcatacagctgtgatccaaggataaaaaagttcaaggaagaagaaaaagccaagaaagaagcagaaaagaaagcaaaagcagaagctaaacggaaggagcaagaagctaaagaaaaacaaagacaagctgaattagaagctgctcggttagctaaggagaaagaagaggaggaagtcagacagcaagcattgctggcaaagaaggaaaaagatatccagaaaaaagccattaagaaggaaaggcaaaaacttcgaaactcatgcaagacctggaatcatttttctgataatgaggcagagcgggttaaaatgatggaagaagtggaaaaactttgtgatcggcttgaactggcaaggtatacctatggaactgctattgaagtcttcacttgagcttaggataaagtttcatttcttctttttttttctttagcttacagtgcttgaatgaaacactcacatcatgcacaaaagaagtaggaaaggctgctttggaaaaacagatagaagaaataaatgagcaaatcagaaaagagaaagaggaagctgaggctcgtatgcgacaagcatctaagaacacagagaaatcaactggtggaggtggaaatggaagtaaaaattggtcagaagatgatctacaattactaattaaagctgtgaatctgttccctgctggaacaaattcaaggtactggttttaatgaaacttttcttcaactcacactggagcctggagataatgtagacagactccaaatagcagcacttgttatcacagaaacttgcagagataaattctgtgccacagcagaaaagttacacatgcacatatacatatgacagaatacttgtttctcaggaaattgaagatcatgagacaagtcttgatttatgttggcttactctgtcatggcttgttctagggattaggttttctgtagtttttcttttacagtcttgctctttgt

SEQ ID NO: 2446 - DNA, 2103 bp, Artificial
  cDNA Sequence
actggtcgtctccatgcgccggttcctgggcgtcttagagccaaggcgcgaggctcggagtgagaggtagagctggaggggaccctaagcgccctccgcccgggacgtgagccgctgcgcccaccgggctagacccggcgccatcatgctgcttctgccaagcgccgcggacggccggggcaccgccatcacccacgctctgacctctgcctctacactctgtcaagttgaacctgtgggaagatggtttgaagcttttgttaagaggagaaacagaaatgcttctgcctcttttcaggaactggaggataagaaagagttatccgaggaatcagaagatgaagaattgcagttggaagagtttcccatgctgaaaacacttgatcccaaagactggaagaaccaagatcattatgcagttcttggacttggccatgtgagatacaaggctacacagagacagatcaaagcagctcataaagcaatggttttaaaacatcacccagacaaacggaaagcagctggtgaaccaataaaagaaggagataatgactacttcacttgcataactaaagcttatgaaatgttatctgatccagtgaaaagacgagcatttaacagtgtagatcctacttttgataactcagttccttctaaaagtgaagcaaaggataatttcttcgaagtgtttaccccagtgtttgaaaggaattccagatggtcaaataaaaaaaatgttcctaaacttggtgatatgaattcatcatttgaagatgtagatatattttattctttctggtataattttgattcttggagagaattttcttatttagatgaagaagaaaaagaaaaagcagaatgtcgtgatgagaggagatggattgaaaagcagaacagagcaacaagagcacaaagaaaaaaagaagaaatgaacagaataagaacattagttgacaatgcatacagctgtgatccaaggataaaaaagttcaaggaagaagaaaaagccaagaaagaagcagaaaagaaagcaaaagcagaagctaaacggaaggagcaagaagctaaagaaaaacaaagacaagctgaattagaagctgctcggttagctaaggagaaagaagaggaggaagtcagacagcaagcattgctggcaaagaaggaaaaagatatccagaaaaaagccattaagaaggaaaggcaaaaacttcgaaactcatgcaagacctggaatcatttttctgataatgaggcagagcgggttaaaatgatggaagaagtggaaaaactttgtgatcggcttgaactggcaagcttacagtgcttgaatgaaacactcacatcatgcacaaaagaagtaggaaaggctgctttggaaaaacagatagaagaaataaatgagcaaatcagaaaagagaaagaggaagctgaggctcgtatgcgacaagcatctaagaacacagagaaatcaactggtggaggtggaaatggaagtaaaaattggtcagaagatgatctacaattactaattaaagctgtgaatctgttccctgctggaacaaattcaagatgggaagttattgctaattacatgaacatacattcttcctctggagtcaaaagaactgccaaagatgttattggcaaagcaaagagtctccaaaaacttgaccctcatcaaaaagatgacataaataaaaaggcatttgataagttcaaaaaagaacatggagtggtacctcaagcagacaacgcaacgccttcagaacgatttgaaggtccatatacagacttcaccccttggacaacagaagaacagaagcttttggaacaagctttgaaaacatacccagtaaatacacctgaaagatgggaaaaaatagcagaagcggtgcctggcaggacaaagaaggactgcatgaaacgatacaaggaacttgtcgagatggtaaaagcaaagaaagctgctcaagaacaagtgctgaatgcaagtagagccaagaaatgacaatctttgttgtgtgtgcatttttataataaaactgaaaatactgtaaacattttcattcttaaaattatactcatggtaataatttgaaa

SEQ ID NO: 2447 - DNA, 2121 bp, Artificial
  cDNA Sequence
actggtcgtctccatgcgccggttcctgggcgtcttagagccaaggcgcgaggctcggagtgagaggtagagctggaggggaccctaagcgccctccgcccgggacgtgagccgctgcgcccaccgggctagacccggcgccatcatgctgcttctgccaagcgccgcggacggccggggcaccgccatcacccacgctctgacctctgcctctacactctgtcaagttgaacctgtgggaagatggtttgaagcttttgttaagaggagaaacagaaatgcttctgcctcttttcaggaactggaggataagaaagagttatccgaggaatcagaagatgaagaattgcagttggaagagtttcccatgctgaaaacacttgatcccaaagactggaagaaccaagatcattatgcagttcttggacttggccatgtgagatacaaggctacacagagacagatcaaagcagctcataaagcaatggttttaaaacatcacccagacaaacggaaagcagctggtgaaccaataaaagaaggagataatgactacttcacttgcataactaaaggtaagaaaatgctttagacttatgaaatgttatctgatccagtgaaaagacgagcatttaacagtgtagatcctacttttgataactcagttccttctaaaagtgaagcaaaggataatttcttcgaagtgtttaccccagtgtttgaaaggaattccagatggtcaaataaaaaaaatgttcctaaacttggtgatatgaattcatcatttgaagatgtagatatattttattctttctggtataattttgattcttggagagaattttcttatttagatgaagaagaaaaagaaaaagcagaatgtcgtgatgagaggagatggattgaaaagcagaacagagcaacaagagcacaaagaaaaaaagaagaaatgaacagaataagaacattagttgacaatgcatacagctgtgatccaaggataaaaaagttcaaggaagaagaaaaagccaagaaagaagcagaaaagaaagcaaaagcagaagctaaacggaaggagcaagaagctaaagaaaaacaaagacaagctgaattagaagctgctcggttagctaaggagaaagaagaggaggaagtcagacagcaagcattgctggcaaagaaggaaaaagatatccagaaaaaagccattaagaaggaaaggcaaaaacttcgaaactcatgcaagacctggaatcatttttctgataatgaggcagagcgggttaaaatgatggaagaagtggaaaaactttgtgatcggcttgaactggcaagcttacagtgcttgaatgaaacactcacatcatgcacaaaagaagtaggaaaggctgctttggaaaaacagatagaagaaataaatgagcaaatcagaaaagagaaagaggaagctgaggctcgtatgcgacaagcatctaagaacacagagaaatcaactggtggaggtggaaatggaagtaaaaattggtcagaagatgatctacaattactaattaaagctgtgaatctgttccctgctggaacaaattcaagatgggaagttattgctaattacatgaacatacattcttcctctggagtcaaaagaactgccaaagatgttattggcaaagcaaagagtctccaaaaacttgaccctcatcaaaaagatgacataaataaaaaggcatttgataagttcaaaaaagaacatggagtggtacctcaagcagacaacgcaacgccttcagaacgatttgaaggtccatatacagacttcaccccttggacaacagaagaacagaagcttttggaacaagctttgaaaacatacccagtaaatacacctgaaagatgggaaaaaatagcagaagcggtgcctggcaggacaaagaaggactgcatgaaacgatacaaggaacttgtcgagatggtaaaagcaaagaaagctgctcaagaacaagtgctgaatgcaagtagagccaagaaatgacaatctttgttgtgtgtgcatttttataataaaactgaaaatactgtaaacattttcattcttaaaattatactcatggtaataatttgaaa

SEQ ID NO: 2448 - DNA, 2173 bp, Artificial
  cDNA Sequence
actggtcgtctccatgcgccggttcctgggcgtcttagagccaaggcgcgaggctcggagtgagaggtagagctggaggggaccctaagcgccctccgcccgggacgtgagccgctgcgcccaccgggctagacccggcgccatcatgctgcttctgccaagcgccgcggacggccggggcaccgccatcacccacgctctgacctctgcctctacactctgtcaagttgaacctgtgggaagatggtttgaagcttttgttaagaggagaaacagaaatgcttctgcctcttttcaggaactggaggataagaaagagttatccgaggaatcagaagatgaagaattgcagttggaagagtttcccatgctgaaaacacttgatcccaaagactggaagaaccaagatcattatgcagttcttggacttggccatgtgagatacaaggctacacagagacagatcaaagcagctcataaagcaatggttttaaaacatcacccagacaaacggaaagcagctggtgaaccaataaaagaaggagataatgactacttcacttgcataactaaagcttatgaaatgttatctgatccagtgaaaagacgagcatttaacagtgtagatcctacttttgataactcagttccttctaaaagtgaagcaaaggataatttcttcgaagtgtttaccccagtgtttgaaaggaattccagatggtcaaataaaaaaaatgttcctaaacttggtgatatgaattcatcatttgaagatgtagatatattttattctttctggtataattttgattcttggagagaattttcttatttagatgaagaagaaaaagaaaaagcagaatgtcgtgatgagaggagatggattgaaaagcagaacagagcaacaagagcacaaagaaaaaaagaagaaatgaacagaataagaacattagttggtaagtagaattgatttaagtcccctaaatgttagaaattcaaaatgagattaactttttcttttgctagacaatgcatacagctgtgatccaaggataaaaaagttcaaggaagaagaaaaagccaagaaagaagcagaaaagaaagcaaaagcagaagctaaacggaaggagcaagaagctaaagaaaaacaaagacaagctgaattagaagctgctcggttagctaaggagaaagaagaggaggaagtcagacagcaagcattgctggcaaagaaggaaaaagatatccagaaaaaagccattaagaaggaaaggcaaaaacttcgaaactcatgcaagacctggaatcatttttctgataatgaggcagagcgggttaaaatgatggaagaagtggaaaaactttgtgatcggcttgaactggcaagcttacagtgcttgaatgaaacactcacatcatgcacaaaagaagtaggaaaggctgctttggaaaaacagatagaagaaataaatgagcaaatcagaaaagagaaagaggaagctgaggctcgtatgcgacaagcatctaagaacacagagaaatcaactggtggaggtggaaatggaagtaaaaattggtcagaagatgatctacaattactaattaaagctgtgaatctgttccctgctggaacaaattcaagatgggaagttattgctaattacatgaacatacattcttcctctggagtcaaaagaactgccaaagatgttattggcaaagcaaagagtctccaaaaacttgaccctcatcaaaaagatgacataaataaaaaggcatttgataagttcaaaaaagaacatggagtggtacctcaagcagacaacgcaacgccttcagaacgatttgaaggtccatatacagacttcaccccttggacaacagaagaacagaagcttttggaacaagctttgaaaacatacccagtaaatacacctgaaagatgggaaaaaatagcagaagcggtgcctggcaggacaaagaaggactgcatgaaacgatacaaggaacttgtcgagatggtaaaagcaaagaaagctgctcaagaacaagtgctgaatgcaagtagagccaagaaatgacaatctttgttgtgtgtgcatttttataataaaactgaaaatactgtaaacattttcattcttaaaattatactcatggtaataatttgaaa

SEQ ID NO: 2449 - DNA, 2191 bp, Artificial
  cDNA Sequence
actggtcgtctccatgcgccggttcctgggcgtcttagagccaaggcgcgaggctcggagtgagaggtagagctggaggggaccctaagcgccctccgcccgggacgtgagccgctgcgcccaccgggctagacccggcgccatcatgctgcttctgccaagcgccgcggacggccggggcaccgccatcacccacgctctgacctctgcctctacactctgtcaagttgaacctgtgggaagatggtttgaagcttttgttaagaggagaaacagaaatgcttctgcctcttttcaggaactggaggataagaaagagttatccgaggaatcagaagatgaagaattgcagttggaagagtttcccatgctgaaaacacttgatcccaaagactggaagaaccaagatcattatgcagttcttggacttggccatgtgagatacaaggctacacagagacagatcaaagcagctcataaagcaatggttttaaaacatcacccagacaaacggaaagcagctggtgaaccaataaaagaaggagataatgactacttcacttgcataactaaaggtaagaaaatgctttagacttatgaaatgttatctgatccagtgaaaagacgagcatttaacagtgtagatcctacttttgataactcagttccttctaaaagtgaagcaaaggataatttcttcgaagtgtttaccccagtgtttgaaaggaattccagatggtcaaataaaaaaaatgttcctaaacttggtgatatgaattcatcatttgaagatgtagatatattttattctttctggtataattttgattcttggagagaattttcttatttagatgaagaagaaaaagaaaaagcagaatgtcgtgatgagaggagatggattgaaaagcagaacagagcaacaagagcacaaagaaaaaaagaagaaatgaacagaataagaacattagttggtaagtagaattgatttaagtcccctaaatgttagaaattcaaaatgagattaactttttcttttgctagacaatgcatacagctgtgatccaaggataaaaaagttcaaggaagaagaaaaagccaagaaagaagcagaaaagaaagcaaaagcagaagctaaacggaaggagcaagaagctaaagaaaaacaaagacaagctgaattagaagctgctcggttagctaaggagaaagaagaggaggaagtcagacagcaagcattgctggcaaagaaggaaaaagatatccagaaaaaagccattaagaaggaaaggcaaaaacttcgaaactcatgcaagacctggaatcatttttctgataatgaggcagagcgggttaaaatgatggaagaagtggaaaaactttgtgatcggcttgaactggcaagcttacagtgcttgaatgaaacactcacatcatgcacaaaagaagtaggaaaggctgctttggaaaaacagatagaagaaataaatgagcaaatcagaaaagagaaagaggaagctgaggctcgtatgcgacaagcatctaagaacacagagaaatcaactggtggaggtggaaatggaagtaaaaattggtcagaagatgatctacaattactaattaaagctgtgaatctgttccctgctggaacaaattcaagatgggaagttattgctaattacatgaacatacattcttcctctggagtcaaaagaactgccaaagatgttattggcaaagcaaagagtctccaaaaacttgaccctcatcaaaaagatgacataaataaaaaggcatttgataagttcaaaaaagaacatggagtggtacctcaagcagacaacgcaacgccttcagaacgatttgaaggtccatatacagacttcaccccttggacaacagaagaacagaagcttttggaacaagctttgaaaacatacccagtaaatacacctgaaagatgggaaaaaatagcagaagcggtgcctggcaggacaaagaaggactgcatgaaacgatacaaggaacttgtcgagatggtaaaagcaaagaaagctgctcaagaacaagtgctgaatgcaagtagagccaagaaatgacaatctttgttgtgtgtgcatttttataataaaactgaaaatactgtaaacattttcattcttaaaattatactcatggtaataatttgaaa

SEQ ID NO: 2450 - DNA, 1929 bp, Artificial
  cDNA Sequence
actggtcgtctccatgcgccggttcctgggcgtcttagagccaaggcgcgaggctcggagtgagaggtagagctggaggggaccctaagcgccctccgcccgggacgtgagccgctgcgcccaccgggctagacccggcgccatcatgctgcttctgccaagcgccgcggacggccggggcaccgccatcacccacgctctgacctctgcctctacactctgtcaagttgaacctgtgggaagatggtttgaagcttttgttaagaggagaaacagaaatgcttctgcctcttttcaggaactggaggataagaaagagttatccgaggaatcagaagatgaagaattgcagttggaagagtttcccatgctgaaaacacttgatcccaaagactggaagaaccaagatcattatgcagttcttggacttggccatgtgagatacaaggctacacagagacagatcaaagcagctcataaagcaatggttttaaaacatcacccagacaaacggaaagcagctggtgaaccaataaaagaaggagataatgactacttcacttgcataactaaagcttatgaaatgttatctgatccagtgaaaagacgagcatttaacagtgtagatcctacttttgataactcagttccttctaaaagtgaagcaaaggataatttcttcgaagtgtttaccccagtgtttgaaaggaattccagatggtcaaataaaaaaaatgttcctaaacttggtgatatgaattcatcatttgaagatgtagatatattttattctttctggtataattttgattcttggagagaattttcttatttagatgaagaagaaaaagaaaaagcagaatgtcgtgatgagaggagatggattgaaaagcagaacagagcaacaagagcacaaagaaaaaaagaagaaatgaacagaataagaacattagttgacaatgcatacagctgtgatccaaggataaaaaagttcaaggaagaagaaaaagccaagaaagaagcagaaaagaaagcaaaagcagaagctaaacggaaggagcaagaagctaaagaaaaacaaagacaagctgaattagaagctgctcggttagctaaggagaaagaagaggaggaagtcagacagcaagcattgctggcaaagaaggaaaaagatatccagaaaaaagccattaagaaggaaaggcaaaaacttcgaaactcatgcaagacctggaatcatttttctgataatgaggcagagcgggttaaaatgatggaagaagtggaaaaactttgtgatcggcttgaactggcaaggtatacctatggaactgctattgaagtcttcacttgagcttaggataaagtttcatttcttctttttttttctttagcttacagtgcttgaatgaaacactcacatcatgcacaaaagaagtaggaaaggctgctttggaaaaacagatagaagaaataaatgagcaaatcagaaaagagaaagaggaagctgaggctcgtatgcgacaagcatctaagaacacagagaaatcaactggtggaggtggaaatggaagtaaaaattggtcagaagatgatctacaattactaattaaagctgtgaatctgttccctgctggaacaaattcaaggtactggttttaatgaaacttttcttcaactcacactggagcctggagataatgtagacagactccaaatagcagcacttgttatcacagaaacttgcagagataaattctgtgccacagcagaaaagttacacatgcacatatacatatgacagaatacttgtttctcaggaaattgaagatcatgagacaagtcttgatttatgttggcttactctgtcatggcttgttctagggattaggttttctgtagtttttcttttacagtcttgctctttgt

SEQ ID NO: 2451 - DNA, 1947 bp, Artificial
  cDNA Sequence
actggtcgtctccatgcgccggttcctgggcgtcttagagccaaggcgcgaggctcggagtgagaggtagagctggaggggaccctaagcgccctccgcccgggacgtgagccgctgcgcccaccgggctagacccggcgccatcatgctgcttctgccaagcgccgcggacggccggggcaccgccatcacccacgctctgacctctgcctctacactctgtcaagttgaacctgtgggaagatggtttgaagcttttgttaagaggagaaacagaaatgcttctgcctcttttcaggaactggaggataagaaagagttatccgaggaatcagaagatgaagaattgcagttggaagagtttcccatgctgaaaacacttgatcccaaagactggaagaaccaagatcattatgcagttcttggacttggccatgtgagatacaaggctacacagagacagatcaaagcagctcataaagcaatggttttaaaacatcacccagacaaacggaaagcagctggtgaaccaataaaagaaggagataatgactacttcacttgcataactaaaggtaagaaaatgctttagacttatgaaatgttatctgatccagtgaaaagacgagcatttaacagtgtagatcctacttttgataactcagttccttctaaaagtgaagcaaaggataatttcttcgaagtgtttaccccagtgtttgaaaggaattccagatggtcaaataaaaaaaatgttcctaaacttggtgatatgaattcatcatttgaagatgtagatatattttattctttctggtataattttgattcttggagagaattttcttatttagatgaagaagaaaaagaaaaagcagaatgtcgtgatgagaggagatggattgaaaagcagaacagagcaacaagagcacaaagaaaaaaagaagaaatgaacagaataagaacattagttgacaatgcatacagctgtgatccaaggataaaaaagttcaaggaagaagaaaaagccaagaaagaagcagaaaagaaagcaaaagcagaagctaaacggaaggagcaagaagctaaagaaaaacaaagacaagctgaattagaagctgctcggttagctaaggagaaagaagaggaggaagtcagacagcaagcattgctggcaaagaaggaaaaagatatccagaaaaaagccattaagaaggaaaggcaaaaacttcgaaactcatgcaagacctggaatcatttttctgataatgaggcagagcgggttaaaatgatggaagaagtggaaaaactttgtgatcggcttgaactggcaaggtatacctatggaactgctattgaagtcttcacttgagcttaggataaagtttcatttcttctttttttttctttagcttacagtgcttgaatgaaacactcacatcatgcacaaaagaagtaggaaaggctgctttggaaaaacagatagaagaaataaatgagcaaatcagaaaagagaaagaggaagctgaggctcgtatgcgacaagcatctaagaacacagagaaatcaactggtggaggtggaaatggaagtaaaaattggtcagaagatgatctacaattactaattaaagctgtgaatctgttccctgctggaacaaattcaaggtactggttttaatgaaacttttcttcaactcacactggagcctggagataatgtagacagactccaaatagcagcacttgttatcacagaaacttgcagagataaattctgtgccacagcagaaaagttacacatgcacatatacatatgacagaatacttgtttctcaggaaattgaagatcatgagacaagtcttgatttatgttggcttactctgtcatggcttgttctagggattaggttttctgtagtttttcttttacagtcttgctctttgt

SEQ ID NO: 2452 - DNA, 1999 bp, Artificial
  cDNA Sequence
actggtcgtctccatgcgccggttcctgggcgtcttagagccaaggcgcgaggctcggagtgagaggtagagctggaggggaccctaagcgccctccgcccgggacgtgagccgctgcgcccaccgggctagacccggcgccatcatgctgcttctgccaagcgccgcggacggccggggcaccgccatcacccacgctctgacctctgcctctacactctgtcaagttgaacctgtgggaagatggtttgaagcttttgttaagaggagaaacagaaatgcttctgcctcttttcaggaactggaggataagaaagagttatccgaggaatcagaagatgaagaattgcagttggaagagtttcccatgctgaaaacacttgatcccaaagactggaagaaccaagatcattatgcagttcttggacttggccatgtgagatacaaggctacacagagacagatcaaagcagctcataaagcaatggttttaaaacatcacccagacaaacggaaagcagctggtgaaccaataaaagaaggagataatgactacttcacttgcataactaaagcttatgaaatgttatctgatccagtgaaaagacgagcatttaacagtgtagatcctacttttgataactcagttccttctaaaagtgaagcaaaggataatttcttcgaagtgtttaccccagtgtttgaaaggaattccagatggtcaaataaaaaaaatgttcctaaacttggtgatatgaattcatcatttgaagatgtagatatattttattctttctggtataattttgattcttggagagaattttcttatttagatgaagaagaaaaagaaaaagcagaatgtcgtgatgagaggagatggattgaaaagcagaacagagcaacaagagcacaaagaaaaaaagaagaaatgaacagaataagaacattagttggtaagtagaattgatttaagtcccctaaatgttagaaattcaaaatgagattaactttttcttttgctagacaatgcatacagctgtgatccaaggataaaaaagttcaaggaagaagaaaaagccaagaaagaagcagaaaagaaagcaaaagcagaagctaaacggaaggagcaagaagctaaagaaaaacaaagacaagctgaattagaagctgctcggttagctaaggagaaagaagaggaggaagtcagacagcaagcattgctggcaaagaaggaaaaagatatccagaaaaaagccattaagaaggaaaggcaaaaacttcgaaactcatgcaagacctggaatcatttttctgataatgaggcagagcgggttaaaatgatggaagaagtggaaaaactttgtgatcggcttgaactggcaaggtatacctatggaactgctattgaagtcttcacttgagcttaggataaagtttcatttcttctttttttttctttagcttacagtgcttgaatgaaacactcacatcatgcacaaaagaagtaggaaaggctgctttggaaaaacagatagaagaaataaatgagcaaatcagaaaagagaaagaggaagctgaggctcgtatgcgacaagcatctaagaacacagagaaatcaactggtggaggtggaaatggaagtaaaaattggtcagaagatgatctacaattactaattaaagctgtgaatctgttccctgctggaacaaattcaaggtactggttttaatgaaacttttcttcaactcacactggagcctggagataatgtagacagactccaaatagcagcacttgttatcacagaaacttgcagagataaattctgtgccacagcagaaaagttacacatgcacatatacatatgacagaatacttgtttctcaggaaattgaagatcatgagacaagtcttgatttatgttggcttactctgtcatggcttgttctagggattaggttttctgtagtttttcttttacagtcttgctctttgt

SEQ ID NO: 2453 - DNA, 2017 bp, Artificial
  cDNA Sequence
actggtcgtctccatgcgccggttcctgggcgtcttagagccaaggcgcgaggctcggagtgagaggtagagctggaggggaccctaagcgccctccgcccgggacgtgagccgctgcgcccaccgggctagacccggcgccatcatgctgcttctgccaagcgccgcggacggccggggcaccgccatcacccacgctctgacctctgcctctacactctgtcaagttgaacctgtgggaagatggtttgaagcttttgttaagaggagaaacagaaatgcttctgcctcttttcaggaactggaggataagaaagagttatccgaggaatcagaagatgaagaattgcagttggaagagtttcccatgctgaaaacacttgatcccaaagactggaagaaccaagatcattatgcagttcttggacttggccatgtgagatacaaggctacacagagacagatcaaagcagctcataaagcaatggttttaaaacatcacccagacaaacggaaagcagctggtgaaccaataaaagaaggagataatgactacttcacttgcataactaaaggtaagaaaatgctttagacttatgaaatgttatctgatccagtgaaaagacgagcatttaacagtgtagatcctacttttgataactcagttccttctaaaagtgaagcaaaggataatttcttcgaagtgtttaccccagtgtttgaaaggaattccagatggtcaaataaaaaaaatgttcctaaacttggtgatatgaattcatcatttgaagatgtagatatattttattctttctggtataattttgattcttggagagaattttcttatttagatgaagaagaaaaagaaaaagcagaatgtcgtgatgagaggagatggattgaaaagcagaacagagcaacaagagcacaaagaaaaaaagaagaaatgaacagaataagaacattagttggtaagtagaattgatttaagtcccctaaatgttagaaattcaaaatgagattaactttttcttttgctagacaatgcatacagctgtgatccaaggataaaaaagttcaaggaagaagaaaaagccaagaaagaagcagaaaagaaagcaaaagcagaagctaaacggaaggagcaagaagctaaagaaaaacaaagacaagctgaattagaagctgctcggttagctaaggagaaagaagaggaggaagtcagacagcaagcattgctggcaaagaaggaaaaagatatccagaaaaaagccattaagaaggaaaggcaaaaacttcgaaactcatgcaagacctggaatcatttttctgataatgaggcagagcgggttaaaatgatggaagaagtggaaaaactttgtgatcggcttgaactggcaaggtatacctatggaactgctattgaagtcttcacttgagcttaggataaagtttcatttcttctttttttttctttagcttacagtgcttgaatgaaacactcacatcatgcacaaaagaagtaggaaaggctgctttggaaaaacagatagaagaaataaatgagcaaatcagaaaagagaaagaggaagctgaggctcgtatgcgacaagcatctaagaacacagagaaatcaactggtggaggtggaaatggaagtaaaaattggtcagaagatgatctacaattactaattaaagctgtgaatctgttccctgctggaacaaattcaaggtactggttttaatgaaacttttcttcaactcacactggagcctggagataatgtagacagactccaaatagcagcacttgttatcacagaaacttgcagagataaattctgtgccacagcagaaaagttacacatgcacatatacatatgacagaatacttgtttctcaggaaattgaagatcatgagacaagtcttgatttatgttggcttactctgtcatggcttgttctagggattaggttttctgtagtttttcttttacagtcttgctctttgt

SEQ ID NO: 2454 - DNA, 1612 bp, Artificial
  cDNA Sequence
ccaataaaagaaggagataatgactacttcacttgcataactaaaggtgattcttatcagaagctcatcctacagttaattcatcttatgaaatgttatctgatccagtgaaaagacgagcatttaacagtgtagatcctacttttgataactcagttccttctaaaagtgaagcaaaggataatttcttcgaagtgtttaccccagtgtttgaaaggaattccagatggtcaaataaaaaaaatgttcctaaacttggtgatatgaattcatcatttgaagatgtagatatattttattctttctggtataattttgattcttggagagaattttcttatttagatgaagaagaaaaagaaaaagcagaatgtcgtgatgagaggagatggattgaaaagcagaacagagcaacaagagcacaaagaaaaaaagaagaaatgaacagaataagaacattagttgacaatgcatacagctgtgatccaaggataaaaaagttcaaggaagaagaaaaagccaagaaagaagcagaaaagaaagcaaaagcagaagctaaacggaaggagcaagaagctaaagaaaaacaaagacaagctgaattagaagctgctcggttagctaaggagaaagaagaggaggaagtcagacagcaagcattgctggcaaagaaggaaaaagatatccagaaaaaagccattaagaaggaaaggcaaaaacttcgaaactcatgcaagacctggaatcatttttctgataatgaggcagagcgggttaaaatgatggaagaagtggaaaaactttgtgatcggcttgaactggcaagcttacagtgcttgaatgaaacactcacatcatgcacaaaagaagtaggaaaggctgctttggaaaaacagatagaagaaataaatgagcaaatcagaaaagagaaagaggaagctgaggctcgtatgcgacaagcatctaagaacacagagaaatcaactggtggaggtggaaatggaagtaaaaattggtcagaagatgatctacaattactaattaaagctgtgaatctgttccctgctggaacaaattcaagatgggaagttattgctaattacatgaacatacattcttcctctggagtcaaaagaactgccaaagatgttattggcaaagcaaagagtctccaaaaacttgaccctcatcaaaaagatgacataaataaaaaggcatttgataagttcaaaaaagaacatggagtggtacctcaagcagacaacgcaacgccttcagaacgatttgaaggtccatatacagacttcaccccttggacaacagaagaacagaagcttttggaacaagctttgaaaacatacccagtaaatacacctgaaagatgggaaaaaatagcagaagcggtgcctggcaggacaaagaaggactgcatgaaacgatacaaggaacttgtcgagatggtaaaagcaaagaaagctgctcaagaacaagtgctgaatgcaagtagagccaagaaatgacaatctttgttgtgtgtgcatttttataataaaactgaaaatactgtaaacattttcattcttaaaattatactcatggtaataatttgaaa

SEQ ID NO: 2455 - DNA, 1682 bp, Artificial
  cDNA Sequence
ccaataaaagaaggagataatgactacttcacttgcataactaaaggtgattcttatcagaagctcatcctacagttaattcatcttatgaaatgttatctgatccagtgaaaagacgagcatttaacagtgtagatcctacttttgataactcagttccttctaaaagtgaagcaaaggataatttcttcgaagtgtttaccccagtgtttgaaaggaattccagatggtcaaataaaaaaaatgttcctaaacttggtgatatgaattcatcatttgaagatgtagatatattttattctttctggtataattttgattcttggagagaattttcttatttagatgaagaagaaaaagaaaaagcagaatgtcgtgatgagaggagatggattgaaaagcagaacagagcaacaagagcacaaagaaaaaaagaagaaatgaacagaataagaacattagttggtaagtagaattgatttaagtcccctaaatgttagaaattcaaaatgagattaactttttcttttgctagacaatgcatacagctgtgatccaaggataaaaaagttcaaggaagaagaaaaagccaagaaagaagcagaaaagaaagcaaaagcagaagctaaacggaaggagcaagaagctaaagaaaaacaaagacaagctgaattagaagctgctcggttagctaaggagaaagaagaggaggaagtcagacagcaagcattgctggcaaagaaggaaaaagatatccagaaaaaagccattaagaaggaaaggcaaaaacttcgaaactcatgcaagacctggaatcatttttctgataatgaggcagagcgggttaaaatgatggaagaagtggaaaaactttgtgatcggcttgaactggcaagcttacagtgcttgaatgaaacactcacatcatgcacaaaagaagtaggaaaggctgctttggaaaaacagatagaagaaataaatgagcaaatcagaaaagagaaagaggaagctgaggctcgtatgcgacaagcatctaagaacacagagaaatcaactggtggaggtggaaatggaagtaaaaattggtcagaagatgatctacaattactaattaaagctgtgaatctgttccctgctggaacaaattcaagatgggaagttattgctaattacatgaacatacattcttcctctggagtcaaaagaactgccaaagatgttattggcaaagcaaagagtctccaaaaacttgaccctcatcaaaaagatgacataaataaaaaggcatttgataagttcaaaaaagaacatggagtggtacctcaagcagacaacgcaacgccttcagaacgatttgaaggtccatatacagacttcaccccttggacaacagaagaacagaagcttttggaacaagctttgaaaacatacccagtaaatacacctgaaagatgggaaaaaatagcagaagcggtgcctggcaggacaaagaaggactgcatgaaacgatacaaggaacttgtcgagatggtaaaagcaaagaaagctgctcaagaacaagtgctgaatgcaagtagagccaagaaatgacaatctttgttgtgtgtgcatttttataataaaactgaaaatactgtaaacattttcattcttaaaattatactcatggtaataatttgaaa

SEQ ID NO: 2456 - DNA, 1438 bp, Artificial
  cDNA Sequence
ccaataaaagaaggagataatgactacttcacttgcataactaaaggtgattcttatcagaagctcatcctacagttaattcatcttatgaaatgttatctgatccagtgaaaagacgagcatttaacagtgtagatcctacttttgataactcagttccttctaaaagtgaagcaaaggataatttcttcgaagtgtttaccccagtgtttgaaaggaattccagatggtcaaataaaaaaaatgttcctaaacttggtgatatgaattcatcatttgaagatgtagatatattttattctttctggtataattttgattcttggagagaattttcttatttagatgaagaagaaaaagaaaaagcagaatgtcgtgatgagaggagatggattgaaaagcagaacagagcaacaagagcacaaagaaaaaaagaagaaatgaacagaataagaacattagttgacaatgcatacagctgtgatccaaggataaaaaagttcaaggaagaagaaaaagccaagaaagaagcagaaaagaaagcaaaagcagaagctaaacggaaggagcaagaagctaaagaaaaacaaagacaagctgaattagaagctgctcggttagctaaggagaaagaagaggaggaagtcagacagcaagcattgctggcaaagaaggaaaaagatatccagaaaaaagccattaagaaggaaaggcaaaaacttcgaaactcatgcaagacctggaatcatttttctgataatgaggcagagcgggttaaaatgatggaagaagtggaaaaactttgtgatcggcttgaactggcaaggtatacctatggaactgctattgaagtcttcacttgagcttaggataaagtttcatttcttctttttttttctttagcttacagtgcttgaatgaaacactcacatcatgcacaaaagaagtaggaaaggctgctttggaaaaacagatagaagaaataaatgagcaaatcagaaaagagaaagaggaagctgaggctcgtatgcgacaagcatctaagaacacagagaaatcaactggtggaggtggaaatggaagtaaaaattggtcagaagatgatctacaattactaattaaagctgtgaatctgttccctgctggaacaaattcaaggtactggttttaatgaaacttttcttcaactcacactggagcctggagataatgtagacagactccaaatagcagcacttgttatcacagaaacttgcagagataaattctgtgccacagcagaaaagttacacatgcacatatacatatgacagaatacttgtttctcaggaaattgaagatcatgagacaagtcttgatttatgttggcttactctgtcatggcttgttctagggattaggttttctgtagtttttcttttacagtcttgctctttgt

SEQ ID NO: 2457 - DNA, 1508 bp, Artificial
  cDNA Sequence
ccaataaaagaaggagataatgactacttcacttgcataactaaaggtgattcttatcagaagctcatcctacagttaattcatcttatgaaatgttatctgatccagtgaaaagacgagcatttaacagtgtagatcctacttttgataactcagttccttctaaaagtgaagcaaaggataatttcttcgaagtgtttaccccagtgtttgaaaggaattccagatggtcaaataaaaaaaatgttcctaaacttggtgatatgaattcatcatttgaagatgtagatatattttattctttctggtataattttgattcttggagagaattttcttatttagatgaagaagaaaaagaaaaagcagaatgtcgtgatgagaggagatggattgaaaagcagaacagagcaacaagagcacaaagaaaaaaagaagaaatgaacagaataagaacattagttggtaagtagaattgatttaagtcccctaaatgttagaaattcaaaatgagattaactttttcttttgctagacaatgcatacagctgtgatccaaggataaaaaagttcaaggaagaagaaaaagccaagaaagaagcagaaaagaaagcaaaagcagaagctaaacggaaggagcaagaagctaaagaaaaacaaagacaagctgaattagaagctgctcggttagctaaggagaaagaagaggaggaagtcagacagcaagcattgctggcaaagaaggaaaaagatatccagaaaaaagccattaagaaggaaaggcaaaaacttcgaaactcatgcaagacctggaatcatttttctgataatgaggcagagcgggttaaaatgatggaagaagtggaaaaactttgtgatcggcttgaactggcaaggtatacctatggaactgctattgaagtcttcacttgagcttaggataaagtttcatttcttctttttttttctttagcttacagtgcttgaatgaaacactcacatcatgcacaaaagaagtaggaaaggctgctttggaaaaacagatagaagaaataaatgagcaaatcagaaaagagaaagaggaagctgaggctcgtatgcgacaagcatctaagaacacagagaaatcaactggtggaggtggaaatggaagtaaaaattggtcagaagatgatctacaattactaattaaagctgtgaatctgttccctgctggaacaaattcaaggtactggttttaatgaaacttttcttcaactcacactggagcctggagataatgtagacagactccaaatagcagcacttgttatcacagaaacttgcagagataaattctgtgccacagcagaaaagttacacatgcacatatacatatgacagaatacttgtttctcaggaaattgaagatcatgagacaagtcttgatttatgttggcttactctgtcatggcttgttctagggattaggttttctgtagtttttcttttacagtcttgctctttgt

SEQ ID NO: 2458 - DNA, 1722 bp, Artificial
  cDNA Sequence
tgcattttaacaggatccccaggtgattcttatcagaagctcatcctacagttaattcatcttatgaaatgttatctgatccagtgaaaagacgagcatttaacagtgtagatcctacttttgataactcagttccttctaaaagtgaagcaaaggataatttcttcgaagtgtttaccccagtgtttgaaaggaattccaggttcccttaaagcacatcttggctgcacattggaattacctggagaacaggaagaactcctgatgcctgagttccacctggaaagattctgatttattggtttgaatttctgtggggatttttaaggctcccagatggtcaaataaaaaaaatgttcctaaacttggtgatatgaattcatcatttgaagatgtagatatattttattctttctggtataattttgattcttggagagaattttcttatttagatgaagaagaaaaagaaaaagcagaatgtcgtgatgagaggagatggattgaaaagcagaacagagcaacaagagcacaaagaaaaaaagaagaaatgaacagaataagaacattagttgacaatgcatacagctgtgatccaaggataaaaaagttcaaggaagaagaaaaagccaagaaagaagcagaaaagaaagcaaaagcagaagctaaacggaaggagcaagaagctaaagaaaaacaaagacaagctgaattagaagctgctcggttagctaaggagaaagaagaggaggaagtcagacagcaagcattgctggcaaagaaggaaaaagatatccagaaaaaagccattaagaaggaaaggcaaaaacttcgaaactcatgcaagacctggaatcatttttctgataatgaggcagagcgggttaaaatgatggaagaagtggaaaaactttgtgatcggcttgaactggcaagcttacagtgcttgaatgaaacactcacatcatgcacaaaagaagtaggaaaggctgctttggaaaaacagatagaagaaataaatgagcaaatcagaaaagagaaagaggaagctgaggctcgtatgcgacaagcatctaagaacacagagaaatcaactggtggaggtggaaatggaagtaaaaattggtcagaagatgatctacaattactaattaaagctgtgaatctgttccctgctggaacaaattcaagatgggaagttattgctaattacatgaacatacattcttcctctggagtcaaaagaactgccaaagatgttattggcaaagcaaagagtctccaaaaacttgaccctcatcaaaaagatgacataaataaaaaggcatttgataagttcaaaaaagaacatggagtggtacctcaagcagacaacgcaacgccttcagaacgatttgaaggtccatatacagacttcaccccttggacaacagaagaacagaagcttttggaacaagctttgaaaacatacccagtaaatacacctgaaagatgggaaaaaatagcagaagcggtgcctggcaggacaaagaaggactgcatgaaacgatacaaggaacttgtcgagatggtaaaagcaaagaaagctgctcaagaacaagtgctgaatgcaagtagagccaagaaatgacaatctttgttgtgtgtgcatttttataataaaactgaaaatactgtaaacattttcattcttaaaattatactcatggtaataatttgaaa

SEQ ID NO: 2459 - DNA, 1548 bp, Artificial
  cDNA Sequence
tgcattttaacaggatccccaggtgattcttatcagaagctcatcctacagttaattcatcttatgaaatgttatctgatccagtgaaaagacgagcatttaacagtgtagatcctacttttgataactcagttccttctaaaagtgaagcaaaggataatttcttcgaagtgtttaccccagtgtttgaaaggaattccaggttcccttaaagcacatcttggctgcacattggaattacctggagaacaggaagaactcctgatgcctgagttccacctggaaagattctgatttattggtttgaatttctgtggggatttttaaggctcccagatggtcaaataaaaaaaatgttcctaaacttggtgatatgaattcatcatttgaagatgtagatatattttattctttctggtataattttgattcttggagagaattttcttatttagatgaagaagaaaaagaaaaagcagaatgtcgtgatgagaggagatggattgaaaagcagaacagagcaacaagagcacaaagaaaaaaagaagaaatgaacagaataagaacattagttgacaatgcatacagctgtgatccaaggataaaaaagttcaaggaagaagaaaaagccaagaaagaagcagaaaagaaagcaaaagcagaagctaaacggaaggagcaagaagctaaagaaaaacaaagacaagctgaattagaagctgctcggttagctaaggagaaagaagaggaggaagtcagacagcaagcattgctggcaaagaaggaaaaagatatccagaaaaaagccattaagaaggaaaggcaaaaacttcgaaactcatgcaagacctggaatcatttttctgataatgaggcagagcgggttaaaatgatggaagaagtggaaaaactttgtgatcggcttgaactggcaaggtatacctatggaactgctattgaagtcttcacttgagcttaggataaagtttcatttcttctttttttttctttagcttacagtgcttgaatgaaacactcacatcatgcacaaaagaagtaggaaaggctgctttggaaaaacagatagaagaaataaatgagcaaatcagaaaagagaaagaggaagctgaggctcgtatgcgacaagcatctaagaacacagagaaatcaactggtggaggtggaaatggaagtaaaaattggtcagaagatgatctacaattactaattaaagctgtgaatctgttccctgctggaacaaattcaaggtactggttttaatgaaacttttcttcaactcacactggagcctggagataatgtagacagactccaaatagcagcacttgttatcacagaaacttgcagagataaattctgtgccacagcagaaaagttacacatgcacatatacatatgacagaatacttgtttctcaggaaattgaagatcatgagacaagtcttgatttatgttggcttactctgtcatggcttgttctagggattaggttttctgtagtttttcttttacagtcttgctctttgt

SEQ ID NO: 2460 - DNA, 877 bp, Artificial
  cDNA Sequence
agacctggaatcatttttctgataatgaggcagagcgggttaaaatgatggaagaagtggaaaaactttgtgatcggcttgaactggcaagcttacagtgcttgaatgaaacactcacatcatgcacaaaagaagtaggaaaggctgctttggaaaaacagatagaagaaataaatgagcaaatcagaaaagagaaagaggaagctgaggctcgtatgcgacaagcatctaagaacacagagaaatcaactggtggaggtggaaatggaagtaaaaattggtcagaagatgatctacaattactaattaaagctgtgaatctgttccctgctggaacaaattcaagatgggaagttattgctaattacatgaacatacattcttcctctggagtcaaaagaactgccaaagatgttattggcaaagcaaagagtctccaaaaacttgaccctcatcaaaaagatgacataaataaaaaggcatttgataagttcaaaaaagaacatggagtggtacctcaagcagacaacgcaacgccttcagaacgatttgaaggtccatatacagacttcaccccttggacaacagaagaacagaagcttttggaacaagctttgaaaacatacccagtaaatacacctgaaagatgggaaaaaatagcagaagcggtgcctggcaggacaaagaaggactgcatgaaacgatacaaggaacttgtcgagatggtaaaagcaaagaaagctgctcaagaacaagtgctgaatgcaagtagagccaagaaatgacaatctttgttgtgtgtgcatttttataataaaactgaaaatactgtaaacattttcattcttaaaattatactcatggtaataatttgaaa

SEQ ID NO: 2461 - DNA, 557 bp, Artificial
  cDNA Sequence
agacctggaatcatttttctgataatgaggcagagcgggttaaaatgatggaagaagtggaaaaactttgtgatcggcttgaactggcaagcttacagtgcttgaatgaaacactcacatcatgcacaaaagaagtaggaaaggctgctttggaaaaacagatagaagaaataaatgagcaaatcagaaaagagaaagaggaagctgaggctcgtatgcgacaagcatctaagaacacagagaaatcaactggtggaggtggaaatggaagtaaaaattggtcagaagatgatctacaattactaattaaagctgtgaatctgttccctgctggaacaaattcaagatgggaagttattgctaattacatgaacatacattcttcctctggagtcaaaagaactgccaaagatgttattggcaaagcaaagagtctccaaaaacttgaccctcatcaaaaagatgacataaataaaaaggcatttgataagttcaaaaaagaacatggagtggtacctcaagcagacaacgcaacgccttcagaacgatttgaaggt

SEQ ID NO: 2462 - DNA, 788 bp, Artificial
  cDNA Sequence
agcttacagtgcttgaatgaaacactcacatcatgcacaaaagaagtaggaaaggctgctttggaaaaacagatagaagaaataaatgagcaaatcagaaaagagaaagaggaagctgaggctcgtatgcgacaagcatctaagaacacagagaaatcaactggtggaggtggaaatggaagtaaaaattggtcagaagatgatctacaattactaattaaagctgtgaatctgttccctgctggaacaaattcaagatgggaagttattgctaattacatgaacatacattcttcctctggagtcaaaagaactgccaaagatgttattggcaaagcaaagagtctccaaaaacttgaccctcatcaaaaagatgacataaataaaaaggcatttgataagttcaaaaaagaacatggagtggtacctcaagcagacaacgcaacgccttcagaacgatttgaaggtccatatacagacttcaccccttggacaacagaagaacagaagcttttggaacaagctttgaaaacatacccagtaaatacacctgaaagatgggaaaaaatagcagaagcggtgcctggcaggacaaagaaggactgcatgaaacgatacaaggaacttgtcgagatggtaaaagcaaagaaagctgctcaagaacaagtgctgaatgcaagtagagccaagaaatgacaatctttgttgtgtgtgcatttttataataaaactgaaaatactgtaaacattttcattcttaaaattatactcatggtaataatttgaaa

SEQ ID NO: 2463 - DNA, 493 bp, Artificial
  cDNA Sequence
agatgggaagttattgctaattacatgaacatacattcttcctctggagtcaaaagaactgccaaagatgttattggcaaagcaaagagtctccaaaaacttgaccctcatcaaaaagatgacataaataaaaaggcatttgataagttcaaaaaagaacatggagtggtacctcaagcagacaacgcaacgccttcagaacgatttgaaggtccatatacagacttcaccccttggacaacagaagaacagaagcttttggaacaagctttgaaaacatacccagtaaatacacctgaaagatgggaaaaaatagcagaagcggtgcctggcaggacaaagaaggactgcatgaaacgatacaaggaacttgtcgagatggtaaaagcaaagaaagctgctcaagaacaagtgctgaatgcaagtagagccaagaaatgacaatctttgttgtgtgtgcatttttataataaaactgaaaatactgtaaaca

SEQ ID NO: 2464 - DNA, 541 bp, Artificial
  cDNA Sequence
aggtagatctttactattgtgttttaaaagcctttgagattttattttctgggatgtgagctatctgaaattttttctcttattaacactcagagggctatatgtatctctcatctctacaagtttattttcaaaatgacacatcccagattgaaatgggcacttagcgaatacttgtggaccacaagacttgtctgagaacatgttcaaagacagttttcaaataaaaatttttcttaatcaggtccatatacagacttcaccccttggacaacagaagaacagaagcttttggaacaagctttgaaaacatacccagtaaatacacctgaaagatgggaaaaaatagcagaagcggtgcctggcaggacaaagaaggactgcatgaaacgatacaaggaacttgtcgagatggtaaaagcaaagaaagctgctcaagaacaagtgctgaatgcaagtagagccaagaaatgacaatctttgttgtgtgtgcatttttataataaaactgaaaatactgtaaacattttcattcttaaaa

SEQ ID NO: 2465 - DNA, 689 bp, Artificial
  cDNA Sequence
ggctgcggggacaagtccgttgaggctgccaggcgagtcaggcctttctggacctcgcctgactcggctgggctgtgcctgaaattgacccagctccactaggaattatgaagaaacaaggagtaagcccaaagccgctgcaatcttcccgccccagcccgtctaagcggccctgcggggcctcccccgcccgggagcgggaggtggaaaagtcggccctaggcggcgggaaactgccggggggcgccaggaggtcctccccggggaggatcccaaatctgaaaaagcgaaaaggcttggagctaaaggtggtggccaaggcccttctcggccccttccagttcgtctgtaattccctggcgcagctccgggaagaggtgcacgaactgcaggcgcggtggttccccagcagaaccactctgcatcgccgtctttgtggcaattctacattggtaagatgtagtttcagtttgaaatatttaaaaacatttgaattaaaaattgccatcactctttgcatacagtaaaacaataacttctggctatatttgtagaacatctttatgtgcaccaatttatacatgtattttgcttttttacaaacctcatatgtgaaacagcatttacaaaatagatgcattaggggaatagtaacttatgaattaaaatatttttgctttaccaaataa

SEQ ID NO: 2466 - DNA, 667 bp, Artificial
  cDNA Sequence
tattaatgaatcagagcattttaaatattgcagtattccttacaaaagtttcattgatttgattctattcacagactgttggtgatatttcgcgtgttttagctacaaacgtttatctaagaaaacagctccttgaacacagtgaggtaaagctttcattttaatctctggtagacttgtgtattaaattctagtttgagggtaattgacaaaggtataaccttgctgctgatgcaccatcagtagtgagttgttcagcattggtgataaatttctgctgatccttctcactctttcatctgctcttacttttgaatagtaataaggatttaaaagctagaaggctgatttatgactatactacagaattaaattaaattgcattcatttaacaataacaagcatttggtttctagcctgctgagctaatcagctacagtccattggggcaggcacccttggccctgtgactggtggccatctgccaccacgtagatttgctggtcagtcagtgacaagctcagaagtgttgaaggatacaaaagatactaaagtcatgttcctgcccttcggtatgtgtaattttacaaaggagacaaataagacaacattttatgtcgtgtaaaattattttgtggcataaaaaggaaaagatcagtgtgggctg

SEQ ID NO: 2467 - DNA, 297 bp, Artificial
  cDNA Sequence
tgttggtgatatttcgcgtgttttagctacaaacgtttatctaagatgctgtctttgcaggtgccatgcctacaatggcaagtgtcaagctgtctacacttcatcccattgtgaatcatccacattacgaagatgcagacttgaggcctggttgcagcatgcttgaaatctgggatgtggaagacccttccaatgcagctaaccctcccttatgtagcgtcctccttgagccgagattgtgccactgcactccagcctgggcgacaaatcaagaccccgtctccaaaaaaaaaaaaa

SEQ ID NO: 2468 - DNA, 485 bp, Artificial
  cDNA Sequence
tgaaaataactcaaaagtttcagtggtcatctaaagtattgtatacactgtatatataggttgaatagaaggtcatcctattcatttattaatgagaggtacaatctccagggatctgtaaaatctattttgtcttaaccaaagaacaaatttttgacatatcttgaataggatgactataaattatgacttttaaattgtcgtaatttttgtactattatgtgatatttttatttttatgtatgttcctaagtagtttagagatagtcacattttaaaaatccaagatcaaacaaatgaatcttatttttatgtattcatagtatagaagaccttcagtaaatagataatatttttgttttattctagaaaacagctccttgaacacagtgagctggcttttcacacattgcagttgttagcatttactgcccttgccattttaattttgaggctaaagctgtttttgacacagcacatgtgtg

SEQ ID NO: 2469 - DNA, 530 bp, Artificial
  cDNA Sequence
cttttacagtggatcaaatacaataccgtaccagatgctgtctttgcaggtgccatgcctacaatggcaagtgtcaagctgtctacacttcatcccattgtgaatcatccacattacgaagatgcagacttgagggcttggacaaaaatagtttattctacatatagtggaaaatctgccaaagaagtaagagataaattgttggagttacatgtgaattattatgttttagaagaggcatggtgtgttgtgagaactaagcctggttgcagcatgcttgaaatctgggatgtggaagacccttccaatgcagctaaccctcccttatgtagcgtcctccttgagccgagattgtgccactgcactccagcctgggcgacaaatcaagaccccgtctccaaaaaaaaaaaaaacaaaacttgattgggatccaaaatcatacaactatacactaaaatcagtgaatattaccttatgtaaattaaaaattaggaaatcaaaagaaaagcatacatataaaaaacagtttt

SEQ ID NO: 2470 - DNA, 255 bp, Artificial
  cDNA Sequence
cagatgctgtctttgcaggtgccatgcctacaatggcaagtgtcaagctgtctacacttcatcccattgtgaatcatccacattacgaagatgcagacttgaggcctggttgcagcatgcttgaaatctgggatgtggaagacccttccaatgcagctaaccctcccttatgtagcgtcctccttgagccgagattgtgccactgcactccagcctgggcgacaaatcaagaccccgtctccaaaaaaaaaaaaa

SEQ ID NO: 2471 - DNA, 1163 bp, Artificial
  cDNA Sequence
tggctgataatggagaaagatcacagcagtgttccaagttctaaagaggaactagacaaagaactcccagtgcttaagccatattttatcactaaccctgaagaagctggagtgagggaagctggcttaagagtcacatggctgggacatgccacggtaatggtggaaatggatgagctcatatttctcacggatcccatctttagctctcgtgcttcaccatcgcagtacatgggtccaaagcgatttcgtcgttccccgtgcacaataagtgaactccctccaatagatgcggtccttatcagtcacaaccactatgaccatctggactacaattctgtcattgctttgaatgagcgatttggtaatgagttgagatggtttgtgcctttgggtctccttgactggatgcaaaaatgtggctgtgagaatgtgattgagttggactggtgggaggagaattgtgtccccggacatgataaggtcacttttgtctttacaccttcccagcactggtgtaaaaggactctaatggatgacaacaaggtgctatggggcagctggtctgtcttggggccttggaatcgattttttttcgcaggagatactggttattgccctgcttttgaagagataggaaaaagatttggaccttttgaccttgcagctattcccatcggagcttatgaaccgaggtggtttatgaaataccagcatgtagacccagaagaagctgtaaggattcacactgatgtccaaacaaagaaatctatggcaattcactggggaacttttgccttagcaaatgagcattacttagagcctccagtgaagctgaatgaagctctagagagatacggacttaacgctgaagatttttttgtcttgaagcatggagaatcaagatacctaaataatgatgatgaaaacttttaataaataatttcctgaggtgaaaaaccgatattgaagattcatttttcttttttccattcttcaggaccttcggcaagagccttcagatgagagggaacagtatattctattgcacgtctacaattcccaaaagacctcttactttgggaggccaaggtgggtgggtcacttgaacccaggagtttgacatcaacctgggcaacatggtgacctcccgtctctctcgg

SEQ ID NO: 2472 - DNA, 1121 bp, Artificial
  cDNA Sequence
acaaaggaactagacaaagaactcccagtgcttaagccatattttatcactaaccctgaagaagctggagtgagggaagctggcttaagagtcacatggctgggacatgccacggtaatggtggaaatggatgagctcatatttctcacggatcccatctttagctctcgtgcttcaccatcgcagtacatgggtccaaagcgatttcgtcgttccccgtgcacaataagtgaactccctccaatagatgcggtccttatcagtcacaaccactatgaccatctggactacaattctgtcattgctttgaatgagcgatttggtaatgagttgagatggtttgtgcctttgggtctccttgactggatgcaaaaatgtggctgtgagaatgtgattgagttggactggtgggaggagaattgtgtccccggacatgataaggtcacttttgtctttacaccttcccagcactggtgtaaaaggactctaatggatgacaacaaggtgctatggggcagctggtctgtcttggggccttggaatcgattttttttcgcaggagatactggttattgccctgcttttgaagagataggaaaaagatttggaccttttgaccttgcagctattcccatcggagcttatgaaccgaggtggtttatgaaataccagcatgtagacccagaagaagctgtaaggattcacactgatgtccaaacaaagaaatctatggcaattcactggggaacttttgccttagcaaatgagcattacttagagcctccagtgaagctgaatgaagctctagagagatacggacttaacgctgaagatttttttgtcttgaagcatggagaatcaagatacctaaataatgatgatgaaaacttttaataaataatttcctgaggtgaaaaaccgatattgaagattcatttttcttttttccattcttcaggaccttcggcaagagccttcagatgagagggaacagtatattctattgcacgtctacaattcccaaaagacctcttactttgggaggccaaggtgggtgggtcacttgaacccaggagtttgacatcaacctgggcaacatggtgacctcccgtctctctcgg

SEQ ID NO: 2473 - DNA, 431 bp, Artificial
  cDNA Sequence
ttggaatcgattttttttcgcaggagatactggttattgccctgcttttgaagagataggaaaaagatttggaccttttgaccttgcagctattcccatcggagcttatgaaccgaggtggtttatgaaataccagcatgtagacccagaagaagctgtaaggattcacactgatgtccaaacaaagaaatctatggcaattcactggggaacttttgccttagcaaatgagcattacttagagcctccagtgaagctgaatgaagctctagagagatacggacttaacgctgaagatttttttgtcttgaagcatggagaatcaagatacctaaataatgatgatgaaaacttttaataaatgtgagcacaggcacttttaatgaaaaaggcatcatctaagtttaaaaacaaatgaaaagacttagaaa

SEQ ID NO: 2474 - DNA, 622 bp, Artificial
  cDNA Sequence
ggtttctagctcatcctccccaaaactgcatgttttatcccagtggttcttaattctcaacatccatagtcctgcgcagaatcttaaagtttggttaagtgaaacagattttagaatttagtgtatatctcaaaggtcagaattaagaaattgccatgtttcttcaggtggtttatgaaataccagcatgtagacccagaagaagctgtaaggattcacactgatgtccaaacaaagaaatctatggcaattcactggggaacttttgccttagcaaatgagcattacttagagcctccagtgaagctgaatgaagctctagagagatacggacttaacgctgaagatttttttgtcttgaagcatggagaatcaagatacctaaataatgatgatgaaaacttttaataaatgtgagcacaggcacttttaatgaaaaaggcatcatctaagtttaaaaacaaatgaaaagacttagaaattcatgaatattgtgattattttacatttggaaacaacttctgcaagtttatgttttatgttttgtgtaataacttgcttcctagtatgatcagctcatgtacactatgagagggttcaggggtgggtcatttaaataatg

SEQ ID NO: 2475 - DNA, 704 bp, Artificial
  cDNA Sequence
gcccgcacgcgcccggcccctagtcccagcgcggggagggtactatcgcagcttctccgtcaggccttgggccatggcctcgctacgcaatgccaacccgaggctgaagaactacttcaaggagaactacattcctcaggtctgcgaggcactgttatgtggtatacttgttacatgtcctgaggatccgctgaggtatttagagggaatgatcatggttataatcaaaagtggtcttcagaatcttctttgggatatgtgcattactccatcaatgaaaccaaacattcgaagattgtctgaaacttacctggaacaactttttgaattggatgatcagctgatgactccggaattgatgataaaagcctgtagcttttatactggacatttagtaaagactcatttttgcacttggagagacatagctcgtacaaatgaaaatgtcgtcctggctgaaaaaatgaacagagcagtgacatgctacaatttcagacttcaaaaatctgtatttcatcactggcactcttatatggaagaccagaaagaaaaacttaaaaatattctattgcggatacaacagatcatctattgtcacaagctaaccattatcctaacaaaatggcggaatacagcaagacataagagtaaaaagaaagaagatgagctgatattaaaacatgaacttcaattgaaaaaatgga

SEQ ID NO: 2476 - DNA, 411 bp, Artificial
  cDNA Sequence
aatgaacacaaatgaaaggaaggctgataaccatcattttactcgttacttccattttcttctacctcagtttaaaagatgtgataatatgtggtcaagttaatcatgcctggatgttgatgacacaactaaactcactgtggaatgctattgatttttcctcagtgaaaaatgtgattccagataaatatatagtgtctactttgcaaaggtggcgtttaaatgtgctgcgtttgaattttcgtggttgtcttctccgacccaaaactttcagatctgtcagccactgtaggaacttgcaagagttgaatgtctctgactgcccaacattcacagatgaatcaatgagacacatttctgagggctgcccgggggtcctgtgtctcaatctgtctaacacaactatcacca

SEQ ID NO: 2477 - DNA, 1806 bp, Artificial
  cDNA Sequence
gaggaggcggaaggagcagaggaccggcagccggcgtcgaggcggggcgcgggaacgacggcggccatggcggcctcggggcccgggtgtcgcagctggtgcttgtgtcccgaggtgccatccgccaccttcttcactgcgctgctctcgctgctggtttccgggcctcgcctgttcctgctgcagcagcccctggcgccctcgggcctcacgctgaagtccgaggcccttcgcaactggcaagccactatggaaggaggggtcaggattacagcagaggagactggcacacagagtgttaagtgacacccactcaatccaccccgaagctgttacacttaattaaccctcaaactgcccagtgagtttacaggctggtaacctacatctttgtctacgagaatcccatctccctgctctgcggcgctatcatcatctggcgctttgctggcaatttcgagagaaccgtgggcaccgtccgccactgcttcttcaccgtgatcttcgccatcttctccgctatcatcttcctgtcattcgaggctgtgtcatcactgtcaaagctgggggaagtggaggatgccagaggtttcaccccagtggcctttgccatgctgggagtcaccaccgtccgttctcggatgaggcgggccctggtgtttggcatggttgtgccctcagtcctggttccgtggctcctgctgggtgcctcgtggctcattccccagacctctttcctcagtaatgtctgcgggctgtccatcgggctggcctatggcctcacctactgctattccatcgacctctcagagcgagtggcactgaagctcgatcagaccttccccttcagcctgatgaggaggatatccgtgttcaagtacgtctcagggtcttcagccgagaggagggcagcccagagccggaaactgaacccggtgcctggctcctaccccacacagagctgccaccctcacctgtccccaagccaccctgtgtcccagacgcagcacgccagtggtcagaagctggcctcctggccctcctgcacccccgggcacatgcccaccttgcctccgtaccagcctgcctccggcctgtgctatgtgcagaaccactttggtccaaaccccacctcctccagtgtctacccagcttctgcgggcacctccctgggcatccagccccccacgcctgtgaacagccctggcacggtgtattctggggccttgggcacaccaggggctgcaggctccaaggagtcctccagggtccccatgccctgagagaatttctagggaagtcatctcacttggccttctgaaggtcctccctaagagtctcctgacaaaagttacttattgaacacctctatgtgccaggctctgtgttgggtactttgatcaatgcccctgtttcagtctcatctgtactcacggcagccctgtggagtacggtgtactggcccagcttacagatgcagaaagcgagacgttctgccatcagataaagtcacgtggctctttagtaacacggacaaggctcctcgccaaggaactcgtggcagaagagggcagcagttggcagtagctgccgatgtctgtccccagctccaccattcctccctgtggctgtgccgtgctcgtggtttcagtgtccgtgtgtccatgtgtctgcccttcaggagctcgcagctggtgtgcttggcggtcccaggcctgtgtagtgtctctcccctgctgcgggcgcccccaccccgattcctctccccagaagcggtgggatgggcccccatgaactgcagcagca

SEQ ID NO: 2478 - DNA, 1676 bp, Artificial
  cDNA Sequence
ggaaggagcagaggaccggcagccggcgtcgaggcggggcgcgggaacgacggcggccatggcggcctcggggcccgggtgtcgcagctggtgcttgtgtcccgaggtgccatccgccaccttcttcactgcgctgctctcgctgctggtttccgggcctcgcctgttcctgctgcagcagcccctggcgccctcgggcctcacgctgaagtccgaggcccttcgcaactggcaagtttacaggctggtaacctacatctttgtctacgagaatcccatctccctgctctgcggcgctatcatcatctggcgctttgctggcaatttcgagagaaccgtgggcaccgtccgccactgcttcttcaccgtgatcttcgccatcttctccgctatcatcttcctgtcattcgaggctgtgtcatcactgtcaaagctgggggaagtggaggatgccagaggtttcaccccagtggcctttgccatgctgggagtcaccaccgtccgttctcggatgaggcgggccctggtgtttggcatggttgtgccctcagtcctggttccgtggctcctgctgggtgcctcgtggctcattccccagacctctttcctcagtaatgtctgcgggctgtccatcgggctggcctatggcctcacctactgctattccatcgacctctcagagcgagtggcactgaagctcgatcagaccttccccttcagcctgatgaggaggatatccgtgttcaagtacgtctcagggtcttcagccgagaggagggcagcccagagccggaaactgaacccggtgcctggctcctaccccacacagagctgccaccctcacctgtccccaagccaccctgtgtcccagacgcagcacgccagtggtcagaagctggcctcctggccctcctgcacccccgggcacatgcccaccttgcctccgtaccagcctgcctccggcctgtgctatgtgcagaaccactttggtccaaaccccacctcctccagtgtctacccagcttctgcgggcacctccctgggcatccagccccccacgcctgtgaacagccctggcacggtgtattctggggccttgggcacaccaggggctgcaggctccaaggagtcctccagggtccccatgccctgagagaatttctagggaagtcatctcacttggccttctgaaggtcctccctaagagtctcctgacaaaagttacttattgaacacctctatgtgccaggctctgtgttgggtactttgatcaatgcccctgtttcagtctcatctgtactcacggcagccctgtggagtacggtgtactggcccagcttacagatgcagaaagcgagacgttctgccatcagataaagtcacgtggctctttagtaacacggacaaggctcctcgccaaggaactcgtggcagaagagggcagcagttggcagtagctgccgatgtctgtccccagctccaccattcctccctgtggctgtgccgtgctcgtggtttcagtgtccgtgtgtccatgtgtctgcccttcaggagctcgcagctggtgtgcttggcggtcccaggcctgtgtagtgtctctcccctgctgcgggcgcccccaccccgattcctctccccagaagcggtgggatgggcccccatgaactgcagcagca

SEQ ID NO: 2479 - DNA, 805 bp, Artificial
  cDNA Sequence
ggtttccgggcctcgcctgttcctgctgcagcagcccctggcgccctcgggcctcacgctgaagtccgaggcccttcgcaactggcaagccactatggaaggaggggtcaggattacagcagaggagactggcacacagagtgttaagtgacacccactcaatccaccccgaagctgttacacttaattaaccctcaaactgcccagtgagactgaacccggtgcctggctcctaccccacacagagctgccaccctcacctgtccccaagccaccctgtgtcccagacgcagcacgccagtggtcagaagctggcctcctggccctcctgcacccccgggcacatgcccaccttgcctccgtaccagcctgcctccggcctgtgctatgtgcagaaccactttggtccaaaccccacctcctccagtgtctacccagcttctgcgggcacctccctgggcatccagccccccacgcctgtgaacagccctggcacggtgtattctggggccttgggcacaccaggggctgcaggctccaaggagtcctccagggtccccatgccctgagagaatttctagggaagtcatctcacttggccttctgaaggtcctccctaagagtctcctgacaaaagttacttattgaacacctctatgtgccaggctctgtgttgggtactttgatcaatgcccctgtttcagtctcatctgtactcacggcagccctgtggagtacggtgtactggcccagcttacagatgcagaaagcgagacgttctgccatcagataaagtcacgtggct

SEQ ID NO: 2480 - DNA, 1309 bp, Artificial
  cDNA Sequence
tgggcctgagccctgcccaggtgcccgcagagagcagccgggctgccagcgtttcatgatcaacatgggagactcccacgtggacaccagctccaccgtgtccgaggcggtggccgaagaagtatctcttttcagcatgacggacatgattctgttttcgctcatcgtgggtctcctaacctactggttcctcttcagaaagaaaaaagaagaagtccccgagttcaccaaaattcagacattgacctcctctgtcagagagagcagctttgtggaaaagatgaagaaaacggggaggaacatcatcgtgttctacggctcccagacggggactgcagaggagtttgccaaccgcctgtccaaggacgcccaccgctacgggatgcgaggcatgtcagcggaccctgaggagtatgacctggccgacctgagcagcctgccagagatcgacaacgccctggtggttttctgcatggccacctacggtgagggagaccccaccgacaatgcccaggacttctacgactggctgcaggagacagacgtggatctctctggggtcaagttcgcggtgtttggtcttgggaacaagacctacgagcacttcaatgccatgggcaagtacgtggacaagcggctggagcagctcggcgcccagcgcatctttgagctggggttgggcgacgacgatgggaacttggaggaggacttcatcacctggcgagagcagttctggccggccgtgtgtgaacactttggggtggaagccactggcgaggagtccagcattcgccagtacgagcttgtggtccacaccgacatagatgcggccaaggtgtacatgggggagatgggccggctgaagagctacgagaaccagaagcccccctttgatgccaagaatccgttcctggctgcagtcaccaccaaccggaagctgaaccagggaaccgagcgccacctcatgcacctggaattggacatctcggactccaaaatcaggtatgaatctggggaccacgtggctgtgtacccagccaacgactctgctctcgtcaaccagctgggcaaaatcctgggtgccgacctggacgtcgtcatgtccctgaacaacctggatggtgagagtccaacaagaagcacccattcccgtgccctacgtcctaccgcacggccctcacctactacctggacatcaccaacccgccgcgtaccaacgtgctgtacgagctggcgcagtacgcctcggagccctcggagcaggagctgctgcgcaagatggcctcctcctccggcgagggcaaggtgc

SEQ ID NO: 2481 - DNA, 1309 bp, Artificial; identical to SEQ ID NO: 2480
  cDNA Sequence

SEQ ID NO: 2482 - DNA, 1309 bp, Artificial; identical to SEQ ID NO: 2480
  cDNA Sequence

SEQ ID NO: 2483 - DNA, 1309 bp, Artificial; identical to SEQ ID NO: 2480
  cDNA Sequence

SEQ ID NO: 2484 - DNA, 1126 bp, Artificial
  cDNA Sequence
tgggcctgagccctgcccaggtgcccgcagagagcagccgggctgccagcgtttcatgatcaacatgggagactcccacgtggacaccagctccaccgtgtccgaggcggtggccgaagaagtatctcttttcagcatgacggacatgattctgttttcgctcatcgtgggtctcctaacctactggttcctcttcagaaagaaaaaagaagaagtccccgagttcaccaaaattcagacattgacctcctctgtcagagagagcagctttgtggaaaagatgaagaaaacggggaggaacatcatcgtgttctacggctcccagacggggactgcagaggagtttgccaaccgcctgtccaaggacgcccaccgctacgggatgcgaggcatgtcagcggaccctgaggagtatgacctggccgacctgagcagcctgccagagatcgacaacgccctggtggttttctgcatggccacctacggtgagggagaccccaccgacaatgcccaggacttctacgactggctgcaggagacagacgtggatctctctggggtcaagttcgcggtgtttggtcttgggaacaagacctacgagcacttcaatgccatgggcaagtacgtggacaagcggctggagcagctcggcgcccagcgcatctttgagctggggttgggcgacgacgatgggaacttggaggaggacttcatcacctggcgagagcagttctggccggccgtgtgtgaacactttggggtggaagccactggcgaggagtccagcattcgccagtacgagcttgtggtccacaccgacatagatgcggccaaggtgtacatgggggagatgggccggctgaagagctacgagaaccagaagcccccctttgatgccaagaatccgttcctggctgcagtcaccaccaaccggaagctgaaccagggaaccgagcgccacctcatgcacctggaattggacatctcggactccaaaatcaggtatgaatctggggaccacgtggctgtgtacccagccaacgactctgctctcgtcaaccagctgggcaaaatcctgggtgccgacctggacgtcgtcatgtccctgaacaacctggatggtgag

SEQ ID NO: 2485 - DNA, 1126 bp, Artificial; identical to SEQ ID NO: 2484
  cDNA Sequence

SEQ ID NO: 2486 - DNA, 1005 bp, Artificial
  cDNA Sequence
tgggcctgagccctgcccaggtgcccgcagagagcagccgggctgccagcgtttcatgatcaacatgggagactcccacgtggacaccagctccaccgtgtccgaggcggtggccgaagaagtatctcttttcagcatgacggacatgattctgttttcgctcatcgtgggtctcctaacctactggttcctcttcagaaagaaaaaagaagaagtccccgagttcaccaaaattcagacattgacctcctctgtcagagagagcagctttgtggaaaagatgaagaaaacggggaggaacatcatcgtgttctacggctcccagacggggactgcagaggagtttgccaaccgcctgtccaaggacgcccaccgctacgggatgcgaggcatgtcagcggaccctgaggagtatgacctggccgacctgagcagcctgccagagatcgacaacgccctggtggttttctgcatggccacctacggtgagggagaccccaccgacaatgcccaggacttctacgactggctgcaggagacagacgtggatctctctggggtcaagttcgcggtgtttggtcttgggaacaagacctacgagcacttcaatgccatgggcaagtacgtggacaagcggctggagcagctcggcgcccagcgcatctttgagctggggttgggcgacgacgatgggaacttggaggaggacttcatcacctggcgagagcagttctggccggccgtgtgtgaacactttggggtggaagccactggcgaggagtccagcattcgccagtacgagcttgtggtccacaccgacatagatgcggccaaggtgtacatgggggagatgggccggctgaagagctacgagaaccagaagcccccctttgatgccaagaatccgttcctggctgcagtcaccaccaaccggaagctgaaccagggaaccgagcgccacctcatgcacctggaattggacatctcggactccaaaatcaggta

SEQ ID NO: 2487 - DNA, 728 bp, Artificial
  cDNA Sequence
tgggcctgagccctgcccaggtgcccgcagagagcagccgggctgccagcgtttcatgatcaacatgggagactcccacgtggacaccagctccaccgtgtccgaggcggtggccgaagaagtatctcttttcagcatgacggacatgattctgttttcgctcatcgtgggtctcctaacctactggttcctcttcagaaagaaaaaagaagaagtccccgagttcaccaaaattcagacattgacctcctctgtcagagagagcagctttgtggaaaagatgaagaaaacggggaggaacatcatcgtgttctacggctcccagacggggactgcagaggagtttgccaaccgcctgtccaaggacgcccaccgctacgggatgcgaggcatgtcagcggaccctgaggagtatgacctggccgacctgagcagcctgccagagatcgacaacgccctggtggttttctgcatggccacctacggtgagggagaccccaccgacaatgcccaggacttctacgactggctgcaggagacagacgtggatctctctggggtcaagttcgcggtgagtcacccagagactgctatgggctcccggtggcctgcggtgcctccctggggactccagatccatgtatctgaaaggcagccctccagacccccaccctgtcctcagcagccagggcaggccacttgtgagaccctctcctctgccccagacc

SEQ ID NO: 2488 - DNA, 1573 bp, Artificial
  cDNA Sequence
ctcctaacagtttcatgatcaacatgggagactcccacgtggacaccagctccaccgtgtccgaggcggtggccgaagaagtatctcttttcagcatgacggacatgattctgttttcgctcatcgtgggtctcctaacctactggttcctcttcagaaagaaaaaagaagaagtccccgagttcaccaaaattcagacattgacctcctctgtcagagagagcagctttgtggaaaagatgaagaaaacggggaggaacatcatcgtgttctacggctcccagacggggactgcagaggagtttgccaaccgcctgtccaaggacgcccaccgctacgggatgcgaggcatgtcagcggaccctgaggagtatgacctggccgacctgagcagcctgccagagatcgacaacgccctggtggttttctgcatggccacctacggtgagggagaccccaccgacaatgcccaggacttctacgactggctgcaggagacagacgtggatctctctggggtcaagttcgcggtgtttggtcttgggaacaagacctacgagcacttcaatgccatgggcaagtacgtggacaagcggctggagcagctcggcgcccagcgcatctttgagctggggttgggcgacgacgatgggaacttggaggaggacttcatcacctggcgagagcagttctggccggccgtgtgtgaacactttggggtggaagccactggcgaggagtccagcattcgccagtacgagcttgtggtccacaccgacatagatgcggccaaggtgtacatgggggagatgggccggctgaagagctacgagaaccagaagcccccctttgatgccaagaatccgttcctggctgcagtcaccaccaaccggaagctgaaccagggaaccgagcgccacctcatgcacctggaattggacatctcggactccaaaatcaggtatgaatctggggaccacgtggctgtgtacccagccaacgactctgctctcgtcaaccagctgggcaaaatcctgggtgccgacctggacgtcgtcatgtccctgaacaacctggatggtgagagtccaacaagaagcacccattcccgtgccctacgtcctaccgcacggccctcacctactacctggacatcaccaacccgccgcgtaccaacgtgctgtacgagctggcgcagtacgcctcggagccctcggagcaggagctgctgcgcaagatggcctcctcctccggcgagggcaaggagctgtacctgagctgggtggtggaggcccggaggcacatcctggccatcctgcaggactgcccgtccctgcggccccccatcgaccacctgtgtgagctgctgccgcgcctgcaggcccgctactactccatcgcctcatcctccaaggtgagggccggcactgccctgccagccacacgctggaggcccagccctgctcacagcaggcagagtgcaaggcggcacaggagctccgagatctgagccctgagctccagttccagccccagcgcagctccaaatgcctccccaggctgtggactcagt

SEQ ID NO: 2489 - DNA, 1268 bp, Artificial
  cDNA Sequence
ctcctaacagtttcatgatcaacatgggagactcccacgtggacaccagctccaccgtgtccgaggcggtggccgaagaagtatctcttttcagcatgacggacatgattctgttttcgctcatcgtgggtctcctaacctactggttcctcttcagaaagaaaaaagaagaagtccccgagttcaccaaaattcagacattgacctcctctgtcagagagagcagctttgtggaaaagatgaagaaaacggggaggaacatcatcgtgttctacggctcccagacggggactgcagaggagtttgccaaccgcctgtccaaggacgcccaccgctacgggatgcgaggcatgtcagcggaccctgaggagtatgacctggccgacctgagcagcctgccagagatcgacaacgccctggtggttttctgcatggccacctacggtgagggagaccccaccgacaatgcccaggacttctacgactggctgcaggagacagacgtggatctctctggggtcaagttcgcggtgtttggtcttgggaacaagacctacgagcacttcaatgccatgggcaagtacgtggacaagcggctggagcagctcggcgcccagcgcatctttgagctggggttgggcgacgacgatgggaacttggaggaggacttcatcacctggcgagagcagttctggccggccgtgtgtgaacactttggggtggaagccactggcgaggagtccagcattcgccagtacgagcttgtggtccacaccgacatagatgcggccaaggtgtacatgggggagatgggccggctgaagagctacgagaaccagaagcccccctttgatgccaagaatccgttcctggctgcagtcaccaccaaccggaagctgaaccagggaaccgagcgccacctcatgcacctggaattggacatctcggactccaaaatcaggtatgaatctggggaccacgtggctgtgtacccagccaacgactctgctctcgtcaaccagctgggcaaaatcctgggtgccgacctggacgtcgtcatgtccctgaacaacctggatggtgagagtccaacaagaagcacccattcccgtgccctacgtcctaccgcacggccctcacctactacctggacatcaccaacccgccgcgtaccaacgtgctgtacgagctggcgcagtacgcctcggagccctcggagcaggagctgctgcgcaagatggcctcctcctccggcgagggcaaggtgc

SEQ ID NO: 2490 - DNA, 1268 bp, Artificial; identical to SEQ ID NO: 2489
  cDNA Sequence

SEQ ID NO: 2491 - DNA, 1085 bp, Artificial
  cDNA Sequence
ctcctaacagtttcatgatcaacatgggagactcccacgtggacaccagctccaccgtgtccgaggcggtggccgaagaagtatctcttttcagcatgacggacatgattctgttttcgctcatcgtgggtctcctaacctactggttcctcttcagaaagaaaaaagaagaagtccccgagttcaccaaaattcagacattgacctcctctgtcagagagagcagctttgtggaaaagatgaagaaaacggggaggaacatcatcgtgttctacggctcccagacggggactgcagaggagtttgccaaccgcctgtccaaggacgcccaccgctacgggatgcgaggcatgtcagcggaccctgaggagtatgacctggccgacctgagcagcctgccagagatcgacaacgccctggtggttttctgcatggccacctacggtgagggagaccccaccgacaatgcccaggacttctacgactggctgcaggagacagacgtggatctctctggggtcaagttcgcggtgtttggtcttgggaacaagacctacgagcacttcaatgccatgggcaagtacgtggacaagcggctggagcagctcggcgcccagcgcatctttgagctggggttgggcgacgacgatgggaacttggaggaggacttcatcacctggcgagagcagttctggccggccgtgtgtgaacactttggggtggaagccactggcgaggagtccagcattcgccagtacgagcttgtggtccacaccgacatagatgcggccaaggtgtacatgggggagatgggccggctgaagagctacgagaaccagaagcccccctttgatgccaagaatccgttcctggctgcagtcaccaccaaccggaagctgaaccagggaaccgagcgccacctcatgcacctggaattggacatctcggactccaaaatcaggtatgaatctggggaccacgtggctgtgtacccagccaacgactctgctctcgtcaaccagctgggcaaaatcctgggtgccgacctggacgtcgtcatgtccctgaacaacctggatggtgag

SEQ ID NO: 2492 - DNA, 964 bp, Artificial
  cDNA Sequence
ctcctaacagtttcatgatcaacatgggagactcccacgtggacaccagctccaccgtgtccgaggcggtggccgaagaagtatctcttttcagcatgacggacatgattctgttttcgctcatcgtgggtctcctaacctactggttcctcttcagaaagaaaaaagaagaagtccccgagttcaccaaaattcagacattgacctcctctgtcagagagagcagctttgtggaaaagatgaagaaaacggggaggaacatcatcgtgttctacggctcccagacggggactgcagaggagtttgccaaccgcctgtccaaggacgcccaccgctacgggatgcgaggcatgtcagcggaccctgaggagtatgacctggccgacctgagcagcctgccagagatcgacaacgccctggtggttttctgcatggccacctacggtgagggagaccccaccgacaatgcccaggacttctacgactggctgcaggagacagacgtggatctctctggggtcaagttcgcggtgtttggtcttgggaacaagacctacgagcacttcaatgccatgggcaagtacgtggacaagcggctggagcagctcggcgcccagcgcatctttgagctggggttgggcgacgacgatgggaacttggaggaggacttcatcacctggcgagagcagttctggccggccgtgtgtgaacactttggggtggaagccactggcgaggagtccagcattcgccagtacgagcttgtggtccacaccgacatagatgcggccaaggtgtacatgggggagatgggccggctgaagagctacgagaaccagaagcccccctttgatgccaagaatccgttcctggctgcagtcaccaccaaccggaagctgaaccagggaaccgagcgccacctcatgcacctggaattggacatctcggactccaaaatcaggta

SEQ ID NO: 2493 - DNA, 831 bp, Artificial
  cDNA Sequence
cagcattcgccagtacgagcttgtggtccacaccgacatagatgcggccaaggtgtacatgggggagatgggccggctgaagagctacgagaaccagaagcccccctttgatgccaagaatccgttcctggctgcagtcaccaccaaccggaagctgaaccagggaaccgagcgccacctcatgcacctggaattggacatctcggactccaaaatcaggtatgaatctggggaccacgtggctgtgtacccagccaacgactctgctctcgtcaaccagctgggcaaaatcctgggtgccgacctggacgtcgtcatgtccctgaacaacctggatggtgagagtccaacaagaagcacccattcccgtgccctacgtcctaccgcacggccctcacctactacctggacatcaccaacccgccgcgtaccaacgtgctgtacgagctggcgcagtacgcctcggagccctcggagcaggagctgctgcgcaagatggcctcctcctccggcgagggcaaggagctgtacctgagctgggtggtggaggcccggaggcacatcctggccatcctgcaggactgcccgtccctgcggccccccatcgaccacctgtgtgagctgctgccgcgcctgcaggcccgctactactccatcgcctcatcctccaaggtgagggccggcactgccctgccagccacacgctggaggcccagccctgctcacagcaggcagagtgcaaggcggcacaggagctccgagatctgagccctgagctccagttccagccccagcgcagctccaaatgcctccccaggctgtggactcagt

SEQ ID NO: 2494 - DNA, 1614 bp, Artificial
  cDNA Sequence
tgggcctgagccctgcccaggtgcccgcagagagcagccgggctgccagcgtttcatgatcaacatgggagactcccacgtggacaccagctccaccgtgtccgaggcggtggccgaagaagtatctcttttcagcatgacggacatgattctgttttcgctcatcgtgggtctcctaacctactggttcctcttcagaaagaaaaaagaagaagtccccgagttcaccaaaattcagacattgacctcctctgtcagagagagcagctttgtggaaaagatgaagaaaacggggaggaacatcatcgtgttctacggctcccagacggggactgcagaggagtttgccaaccgcctgtccaaggacgcccaccgctacgggatgcgaggcatgtcagcggaccctgaggagtatgacctggccgacctgagcagcctgccagagatcgacaacgccctggtggttttctgcatggccacctacggtgagggagaccccaccgacaatgcccaggacttctacgactggctgcaggagacagacgtggatctctctggggtcaagttcgcggtgtttggtcttgggaacaagacctacgagcacttcaatgccatgggcaagtacgtggacaagcggctggagcagctcggcgcccagcgcatctttgagctggggttgggcgacgacgatgggaacttggaggaggacttcatcacctggcgagagcagttctggccggccgtgtgtgaacactttggggtggaagccactggcgaggagtccagcattcgccagtacgagcttgtggtccacaccgacatagatgcggccaaggtgtacatgggggagatgggccggctgaagagctacgagaaccagaagcccccctttgatgccaagaatccgttcctggctgcagtcaccaccaaccggaagctgaaccagggaaccgagcgccacctcatgcacctggaattggacatctcggactccaaaatcaggtatgaatctggggaccacgtggctgtgtacccagccaacgactctgctctcgtcaaccagctgggcaaaatcctgggtgccgacctggacgtcgtcatgtccctgaacaacctggatggtgagagtccaacaagaagcacccattcccgtgccctacgtcctaccgcacggccctcacctactacctggacatcaccaacccgccgcgtaccaacgtgctgtacgagctggcgcagtacgcctcggagccctcggagcaggagctgctgcgcaagatggcctcctcctccggcgagggcaaggagctgtacctgagctgggtggtggaggcccggaggcacatcctggccatcctgcaggactgcccgtccctgcggccccccatcgaccacctgtgtgagctgctgccgcgcctgcaggcccgctactactccatcgcctcatcctccaaggtgagggccggcactgccctgccagccacacgctggaggcccagccctgctcacagcaggcagagtgcaaggcggcacaggagctccgagatctgagccctgagctccagttccagccccagcgcagctccaaatgcctccccaggctgtggactcagt

SEQ ID NO: 2495 - DNA, 1614 bp, Artificial; identical to SEQ ID NO: 2494
  cDNA Sequence

SEQ ID NO: 2496 - DNA, 1320 bp, Artificial
  cDNA Sequence
cactctcgcgaggccccagagagcaggcgctgggcagtgtggaggtcgttggagtcacttccccgtcaccagctcctgtgcctgccagtcggtgcccctcccgctccagccatgctctccgccctcgcccggcctgccagcgctgctctccgccgcagcttcagcacctcggcccagaacaatgctaaagtagctgtgctaggggcctctggaggcatcgggcagccactttcacttctcctgaagaacagccccttggtgagccgcctgaccctctatgatatcgcgcacacacccggagtggccgcagatctgagccacatcgagaccaaagccgctgtgaaaggctacctcggacctgaacagctgcctgactgcctgaaaggttgtgatgtggtagttattccggctggagtccccagaaagccaggcatgacccgggacgacctgttcaacaccaatgccacgattgtggccaccctgaccgctgcctgtgcccagcactgcccggaagccatgatctgcgtcattgccaatccggttaattccaccatccccatcacagcagaagttttcaagaagcatggagtgtacaaccccaacaaaatcttcggcgtgacgaccctggacatcgtcagagccaacacctttgttgcagagctgaagggtttggatccagctcgagtcaacgtccctgtcattggtggccatgctgggaagaccatcatccccctgatctctcagtgcacccccaaggtggactttccccaggaccagctgacagcactcactgggcggatccaggaggccggcacggaggtggtcaaggctaaagccggagcaggctctgccaccctctccatggcgtatgccggcgcccgctttgtcttctcccttgtggatgcaatgaatggaaaggaaggtgttgtggaatgttccttcgttaagtcacaggaaacggaatgtacctacttctccacaccgctgctgcttgggaaaaagggcatcgagaagaacctgggcatcggcaaagtctcctcttttgaggagaagatgatctcggatgccatccccgagctgaaggcctccatcaagaagggggaagatttcgtgaagaccctgaagtgagccgctgtgacgggtggccagtttccttaatttatgaaggcatcatgtcactgcaaagccgttgcagataaactttgtattttaatttgctttggtgatgattactgtattgacatcatcatgccttccaaattgtgggtggctctgtgggcgcatcaataaaagccgtccttgattttatttttcaaggtc

SEQ ID NO: 2497 - DNA, 1072 bp, Artificial
  cDNA Sequence
gcctgccagtcggtgcccctcccgctccagccatgctctccgccctcgcccggcctgccagcgctgctctccgccgcagcttcagcacctcggcccaggctacctcggacctgaacagctgcctgactgcctgaaaggttgtgatgtggtagttattccggctggagtccccagaaagccaggcatgacccgggacgacctgttcaacaccaatgccacgattgtggccaccctgaccgctgcctgtgcccagcactgcccggaagccatgatctgcgtcattgccaatccggttaattccaccatccccatcacagcagaagttttcaagaagcatggagtgtacaaccccaacaaaatcttcggcgtgacgaccctggacatcgtcagagccaacacctttgttgcagagctgaagggtttggatccagctcgagtcaacgtccctgtcattggtggccatgctgggaagaccatcatccccctgatctctcagtgcacccccaaggtggactttccccaggaccagctgacagcactcactgggcggatccaggaggccggcacggaggtggtcaaggctaaagccggagcaggctctgccaccctctccatggcgtatgccggcgcccgctttgtcttctcccttgtggatgcaatgaatggaaaggaaggtgttgtggaatgttccttcgttaagtcacaggaaacggaatgtacctacttctccacaccgctgctgcttgggaaaaagggcatcgagaagaacctgggcatcggcaaagtctcctcttttgaggagaagatgatctcggatgccatccccgagctgaaggcctccatcaagaagggggaagatttcgtgaagaccctgaagtgagccgctgtgacgggtggccagtttccttaatttatgaaggcatcatgtcactgcaaagccgttgcagataaactttgtattttaatttgctttggtgatgattactgtattgacatcatcatgccttccaaattgtgggtggctctgtgggcgcatcaataaaagccgtccttgattttatttttcaaggtc

SEQ ID NO: 2498 - DNA, 577 bp, Artificial
  cDNA Sequence
gtgcacccccaaggtggactttccccaggaccagctgacagcactcactgggcggatccaggaggccggcacggaggtggtcaaggctaaagccggagcaggctctgccaccctctccatggcgtatgccggcgcccgctttgtcttctcccttgtggatgcaatgaatggaaaggaaggtgttgtggaatgttccttcgttaagtcacaggaaacggaatgtacctacttctccacaccgctgctgcttgggaaaaagggcatcgagaagaacctgggcatcggcaaagtctcctcttttgaggagaagatgatctcggatgccatccccgagctgaaggcctccatcaagaagggggaagatttcgtgaagaccctgaagtgagccgctgtgacgggtggccagtttccttaatttatgaaggcatcatgtcactgcaaagccgttgcagataaactttgtattttaatttgctttggtgatgattactgtattgacatcatcatgccttccaaattgtgggtggctctgtgggcgcatcaataaaagccgtccttgattttatttttcaaggtc

SEQ ID NO: 2499 - DNA, 959 bp, Artificial
  cDNA Sequence
gctgtccagcatttcagcaagcggcggcagcacccgcggggaggcagagggtgcggggccgtgggggccgcggagctgccctgcccaactcagcccagactaggcggcagcccggaccggcgggacccgagggcctggccccagcgcccggtagatcgcggcggtcagcggtgagggccagcggcccaggccagcggctccagggccagccacgatgtcctccaccgtgaacaacggggcggccagcatgcagtccacacccgacgccgcgaacggcttcccgcagcccagctcctcctcggggacctggccgcgggcggaagaggagctgcgcgccgcggagccgggcctggtgaagcgcgcgcaccgcgagatcctggaccacgagcgcaagcggcgggtggagctcaagtgcatggagctgcaggagatgatggaggagcaggggtattcggaggaggagattcggcagaaagtggggacattccggcagatgctgatggagaaggagggagtgctcaccagggaggaccggcctgggggccacattgtggcggagaccccgcggctgaccgagggcgctgagccgggcctggagtacgcgccctttgacgatgacgacggcccagtggactgtgactgcccggcctcctgctaccgcggccaccgcgggtacaggaccaagcattggtctagcagctcggcatcgccccctcccaagaaaaagaagaaaaagaaaggcggccaccggagaagccgcaaaaagaggagactggagtccgaatgcagctgtgggagctcctcacccctccgcaagaagaagaagagtgtgaagaagcatcgccgagacaggtctgattctgggtcccggaggaagagacggcacagatctcgaagctccaagtgcaaaagaaaagagaagaacaaagagaagaagaggcctcacacagagtccccag

SEQ ID NO: 2500 - DNA, 691 bp, Artificial
  cDNA Sequence
gctgtccagcatttcagcaagcggcggcagcacccgcggggaggcagagggtgcggggccgtgggggccgcggagctgccctgcccaactcagcccagactaggcggcagcccggaccggcgggacccgagggcctggccccagcgcccggtagatcgcggcggtcagcggtgagggccagcggcccaggccagcggctccagggccagccacgatgtcctccaccgtgaacaacggggcggccagcatgcagtccacacccgacgccgcgaacggcttcccgcagcccagctcctcctcggggacctggccgcgggcggaagaggagctgcgcgccgcggagccgggcctggtgaagcgcgcgcaccgcgagatcctggaccacgagcgcaagcggcgggtggagctcaagtgcatggagctgcaggagatgatggaggagcaggggtattcggaggaggagattcggcagaaagtggggacattccggcagatgctgatggagaaggagggagtgctcaccagggaggaccggcctgggggccacattgtggcggagaccccgcggctgaccgagggcgctgagccgggcctggagtacgcgccctttgacgatgacgacggcccagtggactgtgactgcccggcctcctgctaccgcggccaccgcgggtacaggtcagcggccgcc

SEQ ID NO: 2501 - DNA, 942 bp, Artificial
  cDNA Sequence
agcatttcagcaagcggcggcagcacccgcggggaggcagagggtgcggggccgtgggggccgcggagctgccctgcccaactcagcccagactaggcggcagcccggaccggcgggacccgagggcctggccccagcgcccggtagatcgcggcggtcagcggtgagggccagcggcccaggccagcggctccagggccagccacgatgtcctccaccgtgaacaacggggcggccagcatgcagtccacacccgacgccgcgaacggcttcccgcagcccagctcctcctcggggacctggccgcgggcggaagaggagctgcgcgccgcggagccgggcctggtgaagcgcgcgcaccgcgagatcctggaccacgagcgcaagcggcgggtggagctcaagtgcatggagctgcaggagatgatggaggagcaggggaggagattcggcagaaagtggggacattccggcagatgctgatggagaaggagggagtgctcaccagggaggaccggcctgggggccacattgtggcggagaccccgcggctgaccgagggcgctgagccgggcctggagtacgcgccctttgacgatgacgacggcccagtggactgtgactgcccggcctcctgctaccgcggccaccgcgggtacaggaccaagcattggtctagcagctcggcatcgccccctcccaagaaaaagaagaaaaagaaaggcggccaccggagaagccgcaaaaagaggagactggagtccgaatgcagctgtgggagctcctcacccctccgcaagaagaagaagagtgtgaagaagcatcgccgagacaggtctgattctgggtcccggaggaagagacggcacagatctcgaagctccaagtgcaaaagaaaagagaagaacaaagagaagaagaggcctcacacagagtccccag

SEQ ID NO: 2502 - DNA, 562 bp, Artificial
  cDNA Sequence
ggcgaagaagtgaccatcccgcctcgtgtctgtgtctgtccctcagggccagcggcccaggccagcggctccagggccagccacgatgtcctccaccgtgaacaacggggcggccagcatgcagtccacacccgacgccgcgaacggcttcccgcagcccagctcctcctcggggacctggccgcgggcggaagaggagctgcgcgccgcggagccgggcctggtgaagcgcgcgcaccgcgagatcctggaccacgagcgcaagcggcgggtggagctcaagtgcatggagctgcaggagatgatggaggagcaggggtattcggaggaggagattcggcagaaagtggggacattccggcagatgctgatggagaaggagggagtgctcaccagggaggaccggcctgggggccacattgtggcggagaccccgcggctgaccgagggcgctgagccgggcctggagtacgcgccctttgacgatgacgacggcccagtggactgtgactgcccggcctcctgctaccgcggccaccgcgggtacaggtcagcggccgcc

SEQ ID NO: 2503 - DNA, 589 bp, Artificial
  cDNA Sequence
ctctttctgtctgggggcacctttctctcttcctgcctctctgtttctgtttgcttctgtcattgtttctgtctttctgtttctctttctccttctcttcccatttctatctctgcctgactttgtctgttcgtctgtctctctgtctgcctcctgtctctctctcttcctttccatccctctcccccggcatgggcctctctcccatgctgccagcccctctgtagcccaccctgtggttctcttccatcagctgcttcctgcatgctctatggaggttttctgttgtttgaacaataaagaaagcttggctagtggaacccattgtttaaaaaggagaaaaaaaaaagagcaaacagaaatggccgtgcaagagccccctcccatccctgggatgagacaaaagccacattggccacccatctactggctcagagggggagcacagtttagggtcactgtctttcccccattctgcattcccaatgcggagaccttcttttcttttttattattgcattcctgtccctgagcactgagaagaagcccagctcgccctcgcccagggtccgtgacaaggcggcggccg

SEQ ID NO: 2504 - DNA, 593 bp, Artificial
  cDNA Sequence
gcggccgcggcgcccccggccccgggcccgagcccggctctgagcgaggccacggcggacacgggaaacgggccaaggagcggcccccgcgcgcgcggcccgccagcacctctccgtccccgggcgcgcacggccggcgcggcggcccagaagggaagagctcgtcgcgcagccccggcccgcacccccgctcctggagctccagccgctcgccctccaaatctcgctcgcgctctgcggagaagcggccccacagccccagccgctcgccgtcgcccaagaagcccctcagccgggacaaggacggcgagggccgcgcaaggcactctgaggccgaggccacccgcgcccggcgccgctcccgcagctactcgcccatccgcaagcggcgccgggactcgccaagcttcatggagccgcggcgcatcaccagcgccgcaagcgtcctattccatactaccggcccagcccctcttcctcctccagctgcttgagcagcgactactcgacccggagccacagccgcagccccagccccggccacagccacgggagctacagcagtcgcagccatgggacccgcagccggacac

SEQ ID NO: 2505 - DNA, 843 bp, Artificial
  cDNA Sequence
attgccattaatagagacctcaaacaccgcctgctaaaaatacccgactggaggagcataaaagcgcagccgagcccagcgccccgcacttttctgagcagacgtccagagcagagtcagccagcatgaccgagcgccgcgtccccttctcgctcctgcggggccccagctgggaccccttccgcgactggtacccgcatagccgcctcttcgaccaggccttcgggctgccccggctgccggaggagtggtcgcagtggttaggcggcagcagctggccaggctacgtgcgccccctgccccccgccgccatcgagagccccgcagtggccgcgcccgcctacagccgcgcgctcagccggcaactcagcagcggggtctcggagatccggcacactgcggaccgctggcgcgtgtccctggatgtcaaccacttcgccccggacgagctgacggtcaagaccaaggatggcgtggtggagatcaccggcaagcacgaggagcggcaggacgagcatggctacatctcccggtgcttcacgcggaaatacacgctgccccccggtgtggaccccacccaagtttcctcctccctgtcccctgagggcacactgaccgtggaggcccccatgcccaagctagccacgcagtccaacgagatcaccatcccagtcaccttcgagtcgcgggcccagcttgggggcccagaagctgcaaaatccgatgagactgccgccaagtaaagccttagcccggatgcccacccctgctgccgccactggctgtgcctcccccgccacctgtgtgttcttttgatacatttatcttctgtttttctcaaat

SEQ ID NO: 2506 - DNA, 921 bp, Artificial
  cDNA Sequence
gggaaacctgtccatcgtgaggactaaccgcgcagagattcccatcgagtgccgctaccccaggcagggcaatgtgagcagccaggccatcctgcccacctggttgcccttcaggaccacggtgttctcagaggagaagctgactttctctctgcgtctgatggaggagaactggaacgctgagaagaggtcccccaccttccacctgggagatgcagcccacctccaggcagaaatccacactggcagccacgtgccactgcggttgtttgtggaccactgcgtggccacaccgacaccagaccagaatgcctccccttatcacaccatcgtggacttccatggctgtcttgtcgacggtctcactgatgcctcttctgcattcaaagttcctcgacccgggccagatacactccagttcacagtggatgtcttccactttgctaatgactccagaaacatgatatacatcacctgccacctgaaggtcaccctagctgagcaggacccagatgaactcaacaaggcctgttccttcagcaagccttccaacagctggttcccagtggaaggctcggctgacatctgtcaatgctgtaacaaaggtgactgtggcactccaagccattccaggaggcagcctcatgtcatgagccagtggtccaggtctgcttcccgtaaccgcaggcatgtgacagaagaagcagatgtcaccgtggggccactgatcttcctggacaggaggggtgaccatgaagtagagcagtgggctttgccttctgacacctcagtggtgctgctgggcgtaggcctggctgtggtggtgtccctgactctgactgctgttatcctggttctcaccaggaggtgtcgcactgcctcccaccctgtgtctgcttccgaataaaagaagaaagcaat

SEQ ID NO: 2507 - DNA, 526 bp, Artificial
  cDNA Sequence
ctcaggcagggcaatgtgagcagccaggccatcctgcccacctggttgcccttcaggaccacggtgttctcagaggagaagctgactttctctctgcgtctgatggaggagaactggaacgctgagaagaggtcccccaccttccacctgggagatgcagcccacctccaggcagaaatccacactggcagccacgtgccactgcggttgtttgtggaccactgcgtggccacaccgacaccagaccagaatgcctccccttatcacaccatcgtggacttccatggctgtcttgtcgacggtctcactgatgcctcttctgcattcaaagttcctcgacccgggccagatacactccagttcacagtggatgtcttccactttgctaatgactccagaaacatgtgacagaagaagcagatgtcaccgtggggccactgatcttcctggacaggaggggtgaccatgaagtagagcagtgggctttgccttctgacacctcagtggtgctgctgggcgtaggcct

SEQ ID NO: 2508 - DNA, 803 bp, Artificial
  cDNA Sequence
gggcatgcgcagcggctcgctcggaagctgcgacgccgagtttcactctggctgccttctcctgagagtcggagccacagccagagccctgcccaggccgagccggagctgcagcccgagcgcggtggtgccctcagccccgtcctcttgtcctcctcagcctcggtgccttggaatttgtgtcgctgagtcagcaagcctttcagatttgcccggtttttgttgtttgtggtttgtatcaagatgggaactcaaacaagtcattcctcctaaggagctggtgtcttcatccagaagggacagtttgtgccagctctccagagagaaaagatctgccggaggcgctgggcaatgaccccgggactccaggccagaggggtctgaagctgtttgggaaagcagcgggactccttgggaagatggccatggccccaagcccttccctggtgcaggtgtacaccagccccgcggctgtggccgtgtgggaatggcaggacgggctgggcacctggcacccctacagtgccaccgtctgcagcttcatcgagcagcagtttgtccagcagaagggccaacgttttgggcttgggagcctggcccacagcatccccttgggccaggcagacccctcgctggccccttacattattgacctccccagctggacccagttccgccaggacaccggtaagacgctgcaccatgcgggctgtgcggagacacctgttcccccagcactcagcccctggccgaggtgtcgtctgggagtggctgagcgacgatggctcctggactgcctatga

SEQ ID NO: 2509 - DNA, 908 bp, Artificial
  cDNA Sequence
cgagtttcactctggctgccttctcctgagagtcggagccacagccagagccctgcccaggccgagccggagctgcagcccgagcgcggtggtgccctcagccccgtcctcttgtcctcctcagcctcggtgccttggaatttgtgtcgctgagtcagcaagcctttcagatttgcccggtttttgttgtttgtggtttgtatcaagatgggaactcaaacaagtcattcctcctaaggagctggtgtcttcatccagaagggacagtttgtgccagctctccagagagaaaagatctgccggaggcgctgggcaatgaccccgggactccaggccagaggggtctgaagctgtttgggaaagcagcgggactccttgggaagatggccatggccccaagcccttccctggtgcaggtgtacaccagccccgcggctgtggccgtgtgggaatggcaggacgggctgggcacctggcacccctacagtgccaccgtctgcagcttcatcgagcagcagtttgtccagcagaagggccaacgttttgggcttgggagcctggcccacagcatccccttgggccaggcagacccctcgctggccccttacattattgacctccccagctggacccagttccgccaggacaccggcaccatgcgggctgtgcggagacacctgttcccccagcactcagcccctggccgaggtgtcgtctgggagtggctgagcgacgatggctcctggactgcctatgaagccagcgtctgtgactatctggagcagcaggtggccaggggcaaccagctcgtggacttggcccccctggggtacaactacactgtcaactacaccacccacacgcagaccaacaagacttccagcttctgccgcagcgtgcggcgccaa

SEQ ID NO: 2510 - DNA, 525 bp, Artificial
  cDNA Sequence
agtttcactctggctgccttctcctgagagtcggagccacagccagagccctgcccaggccgagccggagctgcagcccgagcgcggtggtgccctcagccccgtcctcttgtcctcctcagcctcggagctggtgtcttcatccagaagggacagtttgtgccagctctccagagagaaaagaaacttccaattgaagacactgagctgaaccattccgcccgcccgcccgcccgagggcactccagatctgccggaggcgctgggcaatgaccccgggactccaggccagaggggtctgaagctgtttgggaaagcagcgggactccttgggaagatggccatggccccaagcccttccctggtgcaggtgtacaccagccccgcggctgtggccgtgtgggaatggcaggacgggctgggcacctggcacccctacagtgccaccgtctgcagcttcatcgagcagcagtttgtccagcagaagggccaacgttttgggcttgggagcctggcccacagcat

SEQ ID NO: 2511 - DNA, 916 bp, Artificial
  cDNA Sequence
ctctggctgccttctcctgagagtcggagccacagccagagccctgcccaggccgagccggagctgcagcccgagcgcggtggtgccctcagccccgtcctcttgtcctcctcagcctcggtgccttggaatttgtgtcgctgagtcagcaagcctttcagatttgcccggtttttgttgtttgtggtttgtatcaagatgggaactcaaacaagtcattcctcctaaggagctggtgtcttcatccagaagggacagtttgtgccagctctccagagagaaaagaaacttccaattgaagacactgagctgaaccattccgcccgcccgcccgcccgagggcactccagatctgccggaggcgctgggcaatgaccccgggactccaggccagaggggtctgaagctgtttgggaaagcagcgggactccttgggaagatggccatggccccaagcccttccctggtgcaggtgtacaccagccccgcggctgtggccgtgtgggaatggcaggacgggctgggcacctggcacccctacagtgccaccgtctgcagcttcatcgagcagcagtttgtccagcagaagggccaacgttttgggcttgggagcctggcccacagcatccccttgggccaggcagacccctcgctggccccttacattattgacctccccagctggacccagttccgccaggacaccggcaccatgcgggctgtgcggagacacctgttcccccagcactcagcccctggccgaggtgtcgtctgggagtggctgagcgacgatggctcctggactgcctatgaagccagcgtctgtgactatctggagcagcaggtggccaggggcaaccagctcgtggacttggcccccctggggtacaactacactgtcaactacaccacccac

SEQ ID NO: 2512 - DNA, 751 bp, Artificial
  cDNA Sequence
ctcctgagagtcggagccacagccagagccctgcccaggccgagccggagctgcagcccgagcgcggtggtgccctcagccccgtcctcttgtcctcctcagcctcgatctgccggaggcgctgggcaatgaccccgggactccaggccagaggggtctgaagctgtttgggaaagcagcgggactccttgggaagatggccatggccccaagcccttccctggtgcaggtgtacaccagccccgcggctgtggccgtgtgggaatggcaggacgggctgggcacctggcacccctacagtgccaccgtctgcagcttcatcgagcagcagtttgtccagcagaagggccaacgttttgggcttgggagcctggcccacagcatccccttgggccaggcagacccctcgctggccccttacattattgacctccccagctggacccagttccgccaggacaccggtaagacgctgcaccatgcgggctgtgcggagacacctgttcccccagcactcagcccctggccgaggtgtcgtctgggagtggctgagcgacgatggctcctggactgcctatgaagccagcgtctgtgactatctggagcagcaggtggccaggggcaaccagctcgtggacttggcccccctggggtacaactacactgtcaactacaccacccacacgcagaccaacaagacttccagcttctgccgcagcgtgcggcgccaagcagggccgccttacccggt

SEQ ID NO: 2513 - DNA, 615 bp, Artificial
  cDNA Sequence
ccagagccctgcccaggccgagccggagctgcagcccgagcgcggtggtgccctcagccccgtcctcttgtcctcctcagcctcggtgccttggaatttgtgtcgctgagtcagcaagcctttcagatttgcccggtttttgttgtttgtggtttgtatcaagatgggaactcaaacaagtcattcctcctaaggagctggtgtcttcatccagaagggacagtttgtgccagctctccagagagaaaagaacacggctggcagatccagctcctcgtatagtgccttcacccgggccaccttctcggcctccttctgcctgtaattttccttcaggatctggtactgttctggagtggcctgtagcagacactgaaccaccagccagctgcatttgttgtcctggaagtcattgccaactctgccagtcacactggggtccccagagaagtcaagatctgccggaggcgctgggcaatgaccccgggactccaggccagaggggtctgaagctgtttgggaaagcagcgggactccttgggaagatggccatggccccaagcccttccctggtgcaggtgtacaccagccccgcggctgtggccgtgtgggaat

SEQ ID NO: 2514 - DNA, 1166 bp, Artificial
  cDNA Sequence
ctgcgcctggcctcggaattgactttgactgcacttccagcatttcagcacatgaaagcctctttttccaagactggcccacgtcagcccagcccactgttggcgagcatgacccatgtttggtctcctccaggactgcatcatctgcatggagaagctgtccacagcgtctggatacagcgatgtgactgacagcaaggcaatcgggtccctagctgtgggccacctcaccaagtgcagccatgccttccacctgctgtgcctcctggccatgtactgcaacggcaataaggatggaagtctgcagtgtccctcctgcaaaaccatctatggagagaagacggggacccagccccagggaaagatggaggtattacggttccagatgtcgctccccggccacgaggactgcgggaccatcctcatagtttacagcattccccatggtatccagggccctgagcaccccaatcccggaaagccgttcactgccagagggtttccccgccagtgctaccttccagacaacgcccagggccgcaaggtcctagagctcctgaaggtggcctggaagaggcggctcatcttcacagtgggcacgtccagcaccacgggtgagacggacaccgtggtatggaacgagatccaccacaagacagagatggaccgcaacattacgggccacggctatcccgaccccaactacctgcagaacgtgctggctgagctggctgcccagggggtgaccgaggactgcctggagcagcagtgacctcgcaccccagcacgcccgcctctggtggccaccccgctgccccatggctggctgggtggccaggcaggaagtgcccagcccgagaggctgggaggtttgttgagggtgtggggtgtgccccacctgaagccggggctccccctgcctgcctctctctcctcctcccctctgggaattgggcagccctgggcagttgtactcatgggggcttaggatgcagctacctcagtgcgcagggcccgtctgtcctctgggggctgcttcgggcccgcggtgctcggggcctggtgtggggcgagtagagacttccccagcctggacgggcgtgggttctgggtcagcttcttttacctcaattttgtttgcaataaatgctctatagccaaagcca

SEQ ID NO: 2515 - DNA, 1175 bp, Artificial
  cDNA Sequence
ccagcttctccagggccaagctgttgggggtgaggtgcagcccgaagcagccagaccagcccctgagcctcccgggtgctggcagctgtcatggggctaccctgggggcagcctcacctagggctgcagatgctcctcctggcgttgaactgtctccggcccagcctgagcctggagctggtgccctacacaccacagataacagcttgggacctggaagggaaggtcacagccaccaccttctccctggagcagccgcgctgtgtcttcgatgggcttgccagcgccagcgataccgtctggctcgtggtggccttcagcaatgcctccaggggcttccagaacccggagacactggctgacattccggcctccccacagctgctgaccgatggccactacatgacgctgcccctgtctccggaccagctgccctgtggcgaccccatggcgggcagcggaggcgcccccgtgctgcgggtgggccatgaccacggctgccaccagcagcccttctgcaacgcgcccctccctggccctggaccctatcgggtgaagttcctcctgatggacaccaggggctcacccagggctgagaccaagtggtcagaccccatcactctccaccaagggaagacccccggatccatcgacacctggccagggcggcgaagtggcagcatgatcgtcattacctccatcctctcttctctggccggcctcctactcttggccttcttggcagcctctaccatgcgcttctccagcctgtggtggccggaggaggccccggagcagctgcggatcggctccttcatgggcaagcgctacatgacccaccacatcccacccagagaggccgccacactgccggtgggctgcaagcctggcctggaccccctccccagcctcagcccctagcctggcctctttgcatggggctgggggagatggggcgctgggagtgagtgcatggtgctttgtcccagctcctgcacccacaggccccctcagggctccttgcctttcccccccaccagcacaccccgtaccctgcctggaatcccagcaccagcccccctgcctctcctctgcctttctggtttctctccctctccaagcatctgtaagttgcactcaggagggtttaggggagggccatgggcaggctggat

SEQ ID NO: 2516 - DNA, 828 bp, Artificial
  cDNA Sequence
gcttctccagggccaagctgttgggggtgaggtgcagcccgaagcagccagaccagcccctgagcctcccgggtgctggcagctgtcatggggctaccctgggggcagcctcacctagggctgcagatgctcctcctggcgttgaactgtctccggcccagcctgagcctgggtgagtgggggtcctggatggacgcgtccagccagacccaaggggctgggggccctgctggagtgattggaccctgggcgcccgcccccctccgattgggagaggcagccccagggacccccacgcccgtctccgtggctcaccttttgtcccccgtggccacagagctggtgccctacacaccacagataacagcttgggacctggaagggaaggtcacagccaccaccttctccctggagcagccgcgctgtgtcttcgatgggcttgccagcgccagcgataccgtctggctcgtggtggccttcagcaatgcctccaggggcttccagaacccggagacactggctgacattccggcctccccacagctgctgaccgatggccactacatgacgctgcccctgtctccggaccagctgccctgtggcgaccccatggcgggcagcggaggcgcccccgtgctgcgggtgggccatgaccacggctgccaccagcagcccttctgcaacgcgcccctccctggccctggaccctatcgggaagacccccggatccatcgacacctggccagggcggcgaagtggcagcatgatcgtcattacctccatcctctcttctctggccggcctcctactcttggccttcttggcagc

SEQ ID NO: 2517 - DNA, 666 bp, Artificial
  cDNA Sequence
agccagaccagcccctgagcctcccgggtgctggcagctgtcatggggctaccctgggggcagcctcacctagggctgcagatgctcctcctggcgttgaactgtctccggcccagcctgagcctggagctggtgccctacacaccacagataacagcttgggacctggaagggaaggtcacagccaccaccttctccctggagcagccgcgctgtgtcttcgatgggcttgccagcgccagcgataccgtctggctcgtggtggccttcagcaatgcctccaggggcttccagaacccggagacactggctgacattccggcctccccacagctgctgaccgatggccactacatgacgctgcccctgtctccggaccagctgccctgtggcgaccccatggcgggcagcggaggcgcccccgtgctgcgggtgggccatgaccacggctgccaccagcagcccttctgcaacgcgcccctccctggccctggaccctatcgggaagacccccggatccatcgacacctggccagggcggcgaagtggcagcatgatcgtcattacctccatcctctcttctctggccggcctcctactcttggccttcttggcagcctctaccatgcgcttctccagcctgtggtggccggaggaggccccgga

SEQ ID NO: 2518 - DNA, 646 bp, Artificial
  cDNA Sequence
atggacgcgtccagccagacccaaggggctgggggccctgctggagtgattggaccctgggcgcccgcccccctccgattgggagaggcagccccagggacccccacgcccgtctccgtggctcaccttttgtcccccgtggccacagagctggtgccctacacaccacagataacagcttgggacctggaagggaaggtcacagccaccaccttctccctggagcagccgcgctgtgtcttcgatgggcttgccagcgccagcgataccgtctggctcgtggtggccttcagcaatgcctccaggggcttccagaacccggagacactggctgacattccggcctccccacagctgctgaccgatggccactacatgacgctgcccctgtctccggaccagctgccctgtggcgaccccatggcgggcagcggaggcgcccccgtgctgcgggtgggccatgaccacggctgccaccagcagcccttctgcaacgcgcccctccctggccctggaccctatcgggtgaagttcctcctgatggacaccaggggctcacccagggctgagaccaagtggtcagaccccatcactctccaccaagggaagacccccggatccatcgacacctggccagggcggcgaa

SEQ ID NO: 2519 - DNA, 729 bp, Artificial
  cDNA Sequence
gccctgagggaggaggtggcatggggggtcagggctggagactgggcgaacacagaacccccactcataaggacaaagctgctttctcccctcccacctccatctgttctctcctcctgcagcctccaggggcttccagaacccggagacactggctgacattccggcctccccacagctgctgaccgatggccactacatgacgctgcccctgtctccggaccagctgccctgtggcgaccccatggcgggcagcggaggcgcccccgtgctgcgggtgggccatgaccacggctgccaccagcagcccttctgcaacgcgcccctccctggccctggaccctatcgggtgaagttcctcctgatggacaccaggggctcacccagggctgagaccaagtggtcagaccccatcactctccaccaagggaagacccccggatccatcgacacctggccagggcggcgaagtggcagcatgatcgtcattacctccatcctctcttctctggccggcctcctactcttggccttcttggcagcctctaccatgcgcttctccagcctgtggtggccggaggaggccccggagcagctgcggatcggctccttcatgggcaagcgctacatgacccaccacatcccacccagagaggccgccacactgccggtgggctgcaagcctggcctggaccccctccccagcctcagcccctagcctggcctctt

SEQ ID NO: 2520 - DNA, 824 bp, Artificial
  cDNA Sequence
aggctgtgctgtcccctcgcaactccaggatggtgtgtagcccagtgactctgaggatcgcccctcctgacagaagattttcgcaccagagcagataatcagctcaacactgtcctcaccatcaagtaatgccccagacccatgtgcaaaggagactgtactgagtgccctcaaagagaagaagaagaaaaggacagtggaggaagaagaccaaatattccttgatggccaggaaaataaaagaagctgtcttgtcgacggtctcactgatgcctcttctgcattcaaagttcctcgacccgggccagatacactccagttcacagtggatgtcttccactttgctaatgactccagaaacatgatatacatcacctgccacctgaaggtcaccctagctgagcaggacccagatgaactcaacaaggcctgttccttcagcaagccttccaacagctggttcccagtggaaggcctggctgacatctgtcaatgctgtaacaaaggtgactgtggcactccaagccattccaggaggcagcctcgtgtcgtgagccagtggtccacgtctgcttccctgtaaccgcaggcatgtgacagaagaagcagatgtcaccgtggggccactgatcttcctggacaggaggggtgaccatgaagtagagcagtgggctttgccttctgacacctcagtggtgctgctgggcgtaggcctggctgtggtggtgtccctgactctgactgctgttatcctggttctcaccaggaggtgtcgcactgcctcccaccctgtgtctgcttccgaataaaagaagaaagcaata

SEQ ID NO: 2521 - DNA, 742 bp, Artificial
  cDNA Sequence
agaccagagcagataatcagctcaacactgtcctcaccatcaagtaatgccccagacccatgtgcaaaggagactgtactgagtgccctcaaagagaagaagaagaaaaggacagtggaggaagaagaccaaatattccttgatggccaggaaaataaaagaagctgtcttgtcgacggtctcactgatgcctcttctgcattcaaagttcctcgacccgggccagatacactccagttcacagtggatgtcttccactttgctaatgactccagaaacatgatatacatcacctgccacctgaaggtcaccctagctgagcaggacccagatgaactcaacaaggcctgttccttcagcaagccttccaacagctggttcccagtggaaggcctggctgacatctgtcaatgctgtaacaaaggtgactgtggcactccaagccattccaggaggcagcctcgtgtcgtgagccagtggtccacgtctgcttccctgtaaccgcaggcatgtgacagaagaagcagatgtcaccgtggggccactgatcttcctggacaggaggggtgaccatgaagtagagcagtgggctttgccttctgacacctcagtggtgctgctgggcgtaggcctggctgtggtggtgtccctgactctgactgctgttatcctggttctcaccaggaggtgtcgcactgcctcccaccctgtgtctgcttccgaataaaagaagaaagcaata

SEQ ID NO: 2522 - DNA, 434 bp, Artificial
  cDNA Sequence
gagtgccctcaaagagaagaagaagaaaaggacagtggaggaagaagaccaaatattccttgatggccaggaaaataaaagaagctgtcttgtcgacggtctcactgatgcctcttctgcattcaaagttcctcgacccgggccagatacactccagttcacagtggatgtcttccactttgctaatgactccagaaacatgatatacatcacctgccacctgaaggtcaccctagctgagcaggacccagatgaactcaacaaggcctgttccttcagcaagccttccaacagctggttcccagtggaaggcctggctgacatctgtcaatgctgtaacaaaggtgactgtggcactccaagccattccaggaggcagcctcgtgtcgtgagccagtggtccacgtctgcttccctgtaaccgcaggcatggt

SEQ ID NO: 2523 - DNA, 547 bp, Artificial
  cDNA Sequence
cctctctccccactcctcttctccgaccctccgggaggccttccccacgggatcgtgggactttaccagatcggtttgtaataacacctcgaagacgctatccgatccatcaggcccagtattcctgtccgggggtacttcccacagtgtgctggaatggttatcacaagaaggctgtgctgtcccctcgcaactccaggatggtgtgtagcccagtgactctgaggatcgcccctcctgacagaagattttcgcgttctgcgataccagagcagataatcagctcaacactgtcctcaccatcaagtaatgccccagacccatgtgcaaaggagactgtactgagtgccctcaaagagaagaagaagaaaaggacagtggaggaagaagaccaaatattccttgatggccaggaaaataaaagaagctgtcttgtcgacggtctcactgatgcctcttctgcattcaaagttcctcgacccgggccagatacactccagttcacagtggatgtcttccactttgctaatgactccagaaacatggt

SEQ ID NO: 2524 - DNA, 604 bp, Artificial
  cDNA Sequence
aggctgtgctgtcccctcgcaactccaggatggtgtgtagcccagtgactctgaggatcgcccctcctgacagaagattttcgcgttctgcgataccagagcagataatcagctcaacactgtcctcaccatcaagtaatgccccagacccatgtgcaaaggagactgtactgagtgccctcaaagagaagaagaagaaaaggacagtggaggaagaagaccaaatattccttgatggccaggaaaataaaagaagctgtcttgtcgacggtctcactgatgcctcttctgcattcaaagttcctcgacccgggccagatacactccagttcacagtggatgtcttccactttgctaatgactccagaaacatgtgacagaagaagcagatgtcaccgtggggccactgatcttcctggacaggaggggtgaccatgaagtagagcagtgggctttgccttctgacacctcagtggtgctgctgggcgtaggcctggctgtggtggtgtccctgactctgactgctgttatcctggttctcaccaggaggtgtcgcactgcctcccaccctgtgtctgcttccgaataaaagaagaaagcaata

SEQ ID NO: 2525 - DNA, 510 bp, Artificial
  cDNA Sequence
ccctggggtagatcccagccccccatgtaggtcccttggctggaaaaggaagaaggagtggtcagatgaatctgaggaggagccggagaaggagctcgcccctgagcctgaggagacctgggtagtggagatgctgtgtgggctcaagatgaagctgaagcaacagcgagtgtcacccatcctccctgagcaccacaaggacttcaacagtcagcttgaggatcctgtcattaaaagattcctggcctgggacaaagatctgagggtgtcggacaagtatctcctggctatggtcatagcgtatttcagccgggccggcctcccctcctggcaataccaacgcattcatttcttcctggctctctacctggccaatgacatggaggaggacgacgaggaccccaaacaaaacatcttctacttcctgtatgggaagacccgctctcgcatacccttggtccgtaaccgtcggttccagttatgccgttgcatgaacccgagggccaggaa

SEQ ID NO: 2526 - DNA, 847 bp, Artificial
  cDNA Sequence
cacaactgcggccaccacgaggacgcgggcgcgctctgcgcaggcccagaggagctgggactgcaagtccagcaggatggttctgagaccacgcgggtgcccactcctcggcccagggacgggcatctacgtctggtcaatggagcccaccgatgcgagggacgtgtagagctctacctagggcaacggtggggcactgtctgtgatgatgcttgggacctgcgggcagccggtgtcctgtgccgccagctgggctgtggccaggccctcgcagcccctggcgaggctcactttggcccaggccgaggccccattctcctggacaatgtcaagtgccgtggggaagaaagtgctctgctgctctgctctcatatccgctgggatgcccacaactgtgaccacagcgaggatgccagtgtcctgtgccagccttcatgacccagcccgctctgcagaccacctcttcttctgggagctgtgacctcccttcctcctccaggaagccctcctcttgtgatgactacagttcactttgcccctccttcccttgcctgggagagagcctacctagacagtgcagtcctgcttgggggagcctggctgtacccccgtccacttactgcgtgacctcagcctgtcatcgactgttgtgagcccaattcagtgaaagctcctgtggttttgctcagccaaaaccaaaacgaggggaagaggatgattcctaactcttctgtttggtggggctctttttatagcaccagactctgccttccttgacctagatccaggaggctcaggggctctttaaatggggtatctcctcttcccccaacccatcttgggatcc

SEQ ID NO: 2527 - DNA, 913 bp, Artificial
  cDNA Sequence
gcagccgcctcgcgcccggtcccgcggtcgcagctccagccgcctcctccgcgcagccgccgcctcagctgctcgctctgtgggtcggtcctctccggcacttgggctccagtcgcgccctccaagcccttcaggccgccccagtgtcctcctccttctccggccagacccagccccgcgaagatggtggaccgcgagcaactggtgcagaaagcccggctggccgagcaggcggagcgctacgacgacatggccgcggccatgaagaacgtgacagagctgaatgagccactgtcgaatgaggaacgaaaccttctgtctgtggcctacaagaacgttgtgggggcacgccgctcttcctggagggtcatcagtagcattgagcagaagacatctgcagacggcaatgagaagaagattgagatggtccgtgcgtaccgggagaagatagagaaggagttggaggctgtgtgccaggatgtgctgagcctgctggataactacctgatcaagaattgcagcgagacccagtacgagagcaaagtgttctacctgaagatgaaaggggactactaccgctacctggctgaagtggccaccggagagaaaagggcgacggtggtggagtcctccgagaaggcctacagcgaagcccacgagatcagcaaagagcacatgcagcccacccaccccatccgattaggcctggctcttaactactccgtcttctactatgagatccagaacgccccagagcaagcgtgccacttggccaagaccgcgttcgacgacgccatcgccgagcttgacaccctcaacgaggactcctacaaggactccacgctcatcatgcagctcctccgcgacaacctcacgctctggacgagcgaccagcaggacgacgatggcggcg

SEQ ID NO: 2528 - DNA, 1003 bp, Artificial
  cDNA Sequence
ctcaggcaggacaaggagctgcctaacaagaggtggaaggggttacgtacgttgcgaaagactccaaccctcctggatgcctggtttgcttttatgtgaaccaacagagctttacaacatcctgaatcaggccacaaaactctccagattaacagaccccaactatctctgtttattggatgtccgttccaaatgggagtatgacgaaagccatgtgatcactgcccttcgagtgaagaagaaaaataatgaatatcttctcccggagtctgtggacctggagtgtgtgaagtactgcgtggtgtatgataacaacagcagcaccctggagatactcttaaaagatgatgatgatgattcagactctgatggtgatggcaaaggaactggatgcatttcagccataccccattgaaatcgtgccagggaaggtcttcgttggcaatttcagtcaagcctgtgaccccaagattcagaaggacttgaaaatcaaagcccatgtcaatgtctccatggatacagggcccttttttgcaggcgatgctgacaagcttctgcacatccggatagaagattccccggaagcccagattcttcccttcttacgccacatgtgtcacttcattgaaattcaccatcaccttggctctgtcattctgatcttttccacccaaggtatcagccgcagttgtgccgccatcatagcctacctcatgcatagtaacgagcagaccttgcagaggtcctgggcctatgtcaagaagtgcaaaaacaacatgtgtccaaatcggggattggtgagccagctgctggaatgggagaagactatccttggagattccatcacaaacatcatggatccgctctactgatcttctccgaggcccaccgaagggtactgaagagcctcacctgggggcattttgtgggtggagggccagagtgtgtatacccaggcttgtctggaaggagaaggcctttgctgcctgaaagtctcatgtta

SEQ ID NO: 2529 - DNA, 885 bp, Artificial
  cDNA Sequence
ctcaggcaggacaaggagctgcctaacaagaggtggaaggggttacgtacgttgcgaaagactccaaccctcctggatgcctggtttgcttttatgtgaaccaacagagctttacaacatcctgaatcaggccacaaaactctccagattaacagaccccaactatctctgtttattggatgtccgttccaaatgggagtatgacgaaagccatgtgatcactgcccttcgagtgaagaagaaaaataatgaatatcttctcccggagtctgtggacctggagtgtgtgaagtactgcgtggtgtatgataacaacagcagcaccctggagatactcttaaaagatgatgatgatgattcagactctgatggtgatggcaaaggaactggatgcatttcagccataccccattgaaatcgtgccagggaaggtcttcgttggcaatttcagtcaagcctgtgaccccaagattcagaaggacttgaaaatcaaagcccatgtcaatgtctccatggatacagggcccttttttgcaggcgatgctgacaagcttctgcacatccggatagaagattccccggaagcccagattcttcccttcttacgccacatgtgtcacttcattgaggtcctgggcctatgtcaagaagtgcaaaaacaacatgtgtccaaatcggggattggtgagccagctgctggaatgggagaagactatccttggagattccatcacaaacatcatggatccgctctactgatcttctccgaggcccaccgaagggtactgaagagcctcacctgggggcattttgtgggtggagggccagagtgtgtatacccaggcttgtctggaaggagaaggcctttgctgcctgaaagtctca

SEQ ID NO: 2530 - DNA, 1105 bp, Artificial
  cDNA Sequence
cggaaaggaaagctgtgggaccatcctggcaaccccggtgtttggctgggttctagcgtagccgtctgtgtggccggtgggggacctgcggtcggagtgggagggccagtctgcacccaagaggtggaagaggacgggctttaggctggaagcgccttagaggagccatttttccaggatgcctggtttgcttttatgtgaaccaacagagctttacaacatcctgaatcaggccacaaaactctccagattaacagaccccaactatctctgtttattggatgtccgttccaaatgggagtatgacgaaagccatgtgatcactgcccttcgagtgaagaagaaaaataatgaatatcttctcccggagtctgtggacctggagtgtgtgaagtactgcgtggtgtatgataacaacagcagcaccctggagatactcttaaaagatgatgatgatgattcagactctgatggtgatggcaaaggaactggatgcatttcagccataccccattgaaatcgtgccagggaaggtcttcgttggcaatttcagtcaagcctgtgaccccaagattcagaaggacttgaaaatcaaagcccatgtcaatgtctccatggatacagggcccttttttgcaggcgatgctgacaagcttctgcacatccggatagaagattccccggaagcccagattcttcccttcttacgccacatgtgtcacttcattgaaattcaccatcaccttggctctgtcattctgatcttttccacccaaggtatcagccgcagttgtgccgccatcatagcctacctcatgcatagtaacgagcagaccttgcagaggtcctgggcctatgtcaagaagtgcaaaaacaacatgtgtccaaatcggggattggtgagccagctgctggaatgggagaagactatccttggagattccatcacaaacatcatggatccgctctactgatcttctccgaggcccaccgaagggtactgaagagcctcacctgggggcattttgtgggtggagggccagagtgtgtatacccaggcttgtctggaaggagaaggcctttgctgcctgaaagtctcatgtta

SEQ ID NO: 2531 - DNA, 1105 bp, Artificial; identical to SEQ ID NO: 2530
  cDNA Sequence

SEQ ID NO: 2532 - DNA, 1141 bp, Artificial
  cDNA Sequence
cggaaaggaaagctgtgggaccatcctggcaaccccggtgtttggctgggttctagcgtagccgtctgtgtggccggtgggggacctgcggtcggagtgggagggccagtctgcacccaagaggtggaagaggacgggctttaggctggaagcgccttagaggagccatttttccagcaggatgcctggtttgcttttatgtgaaccaacagagctttacaacatcctgaatcaggccacaaaactctccagattaacagaccccaactatctctgtttattggatgtccgttccaaatgggagtatgacgaaagccatgtgatcactgcccttcgagtgaagaagaaaaataatgaatatcttctcccggagtctgtggacctggagtgtgtgaagtactgcgtggtgtatgataacaacagcagcaccctggagatactcttaaaagatgatgatgatgattcagactctgatggtgatggcaaagatcttgtgcctcaagcagccattgagtatggcaggatcctgacccgcctcacccaccaccccgtctacatcctgaaagggggctatgagcgcttctcaggcacgtaccactttctccggacccagaagatcatctggatgcctcaggaactggatgcatttcagccataccccattgaaatcgtgccagggaaggtcttcgttggcaatttcagtcaagcctgtgaccccaagattcagaaggacttgaaaatcaaagcccatgtcaatgtctccatggatacagggcccttttttgcaggcgatgctgacaagcttctgcacatccggatagaagattccccggaagcccagattcttcccttcttacgccacatgtgtcacttcattgaggtcctgggcctatgtcaagaagtgcaaaaacaacatgtgtccaaatcggggattggtgagccagctgctggaatgggagaagactatccttggagattccatcacaaacatcatggatccgctctactgatcttctccgaggcccaccgaagggtactgaagagcctcacctgggggcattttgtgggtggagggccagagtgtgtatacccaggcttgtctggaaggagaaggcctttgctgcctgaaagtctcatgtta

SEQ ID NO: 2533 - DNA, 987 bp, Artificial
  cDNA Sequence
cggaaaggaaagctgtgggaccatcctggcaaccccggtgtttggctgggttctagcgtagccgtctgtgtggccggtgggggacctgcggtcggagtgggagggccagtctgcacccaagaggtggaagaggacgggctttaggctggaagcgccttagaggagccatttttccaggatgcctggtttgcttttatgtgaaccaacagagctttacaacatcctgaatcaggccacaaaactctccagattaacagaccccaactatctctgtttattggatgtccgttccaaatgggagtatgacgaaagccatgtgatcactgcccttcgagtgaagaagaaaaataatgaatatcttctcccggagtctgtggacctggagtgtgtgaagtactgcgtggtgtatgataacaacagcagcaccctggagatactcttaaaagatgatgatgatgattcagactctgatggtgatggcaaaggaactggatgcatttcagccataccccattgaaatcgtgccagggaaggtcttcgttggcaatttcagtcaagcctgtgaccccaagattcagaaggacttgaaaatcaaagcccatgtcaatgtctccatggatacagggcccttttttgcaggcgatgctgacaagcttctgcacatccggatagaagattccccggaagcccagattcttcccttcttacgccacatgtgtcacttcattgaggtcctgggcctatgtcaagaagtgcaaaaacaacatgtgtccaaatcggggattggtgagccagctgctggaatgggagaagactatccttggagattccatcacaaacatcatggatccgctctactgatcttctccgaggcccaccgaagggtactgaagagcctcacctgggggcattttgtgggtggagggccagagtgtgtatacccaggcttgtctggaaggagaaggcctttgctgcctgaaagtctca

SEQ ID NO: 2534 - DNA, 1249 bp, Artificial
  cDNA Sequence
cggaaaggaaagctgtgggaccatcctggcaaccccggtgtttggctgggttctagcgtagccgtctgtgtggccggtgggggacctgcggtcggagtgggagggccagtctgcacccaagaggtggaagaggacgggctttaggctggaagcgccttagaggagccatttttccagcaggatgcctggtttgcttttatgtgaaccaacagagctttacaacatcctgaatcaggccacaaaactctccagattaacagaccccaactatctctgtttattggatgtccgttccaaatgggagtatgacgaaagccatgtgatcactgcccttcgagtgaagaagaaaaataatgaatatcttctcccggagtctgtggacctggagtgtgtgaagtactgcgtggtgtatgataacaacagcagcaccctggagatactcttaaaagatgatgatgatgattcagactctgatggtgatggcaaagatcttgtgcctcaagcagccattgagtatggcaggatcctgacccgcctcacccaccaccccgtctacatcctgaaagggggctatgagcgcttctcaggcacgtaccactttctccggacccagaagatcatctggatgcctcaggaactggatgcatttcagccataccccattgaaatcgtgccagggaaggtcttcgttggcaatttcagtcaagcctgtgaccccaagattcagaaggacttgaaaatcaaagcccatgtcaatgtctccatggatacagggcccttttttgcaggcgatgctgacaagcttctgcacatccggatagaagattccccggaagcccagattcttcccttcttacgccacatgtgtcacttcattgaaattcaccatcaccttggctctgtcattctgatcttttccacccaaggtatcagccgcagttgtgccgccatcatagcctacctcatgcatagtaacgagcagaccttgcagaggtcctgggcctatgtcaagaagtgcaaaaacaacatgtgtccaaatcggggattggtgagccagctgctggaatgggagaagactatccttggagattccatcacaaacatcatggatccgctctactgatcttctccgaggcccaccgaagggtactgaagagcctcacctgggggcattttgtgggtggagggccagagtgtgtatacccaggcttgtctggaaggagaaggcctttgctgcctgaaagtctca

SEQ ID NO: 2535 - DNA, 762 bp, Artificial
  cDNA Sequence
ctggcaaccccggtgtttggctgggttctagcgtagccgtctgtgtggccggtgggggacctgcggtcggagtgggagggccagtctgcacccaagaggtggaagaggacgggctttaggctggaagcgccttagaggagccatttttccaggtggggccccaggcagaggctccgacagggagcctggccatagtcgcgcagccggggaggtggagcgcgtcccagacccgagcccccgacctcagccaaacccattccttctgcccttggaggccagaggggactctgagctccggaaagcaggatgcctggtttgcttttatgtgaaccaacagagctttacaacatcctgaatcaggccacaaaactctccagattaacagaccccaactatctctgtttattggatgtccgttccaaatgggagtatgacgaaagccatgtgatcactgcccttcgagtgaagaagaaaaataatgaatatcttctcccggagtctgtggacctggagtgtgtgaagtactgcgtggtgtatgataacaacagcagcaccctggagatactcttaaaagatgatgatgatgattcagactctgatggtgatggcaaagatcttgtgcctcaagcagccattgagtatggcaggatcctgacccgcctcacccaccaccccgtctacatcctgaaagggggctatgagcgcttctcaggcacgtaccactttctccggacccagaagatcatctggatgcctcaggta

SEQ ID NO: 2536 - DNA, 1212 bp, Artificial
  cDNA Sequence
tgggttctagcgtagccgtctgtgtggccggtgggggacctgcggtcggagtgggagggccagtctgcacccaagaggtggaagaggacgggctttaggctggaagcgccttagaggagccatttttccaggtggggccccaggcagaggctccgacagggagcctggccatagtcgcgcagccggggaggtggagcgcgtcccagacccgagcccccgacctcagccaaacccattccttctgcccttggaggccagaggggactctgagctccggaaagcaggatgcctggtttgcttttatgtgaaccaacagagctttacaacatcctgaatcaggccacaaaactctccagattaacagaccccaactatctctgtttattggatgtccgttccaaatgggagtatgacgaaagccatgtgatcactgcccttcgagtgaagaagaaaaataatgaatatcttctcccggagtctgtggacctggagtgtgtgaagtactgcgtggtgtatgataacaacagcagcaccctggagatactcttaaaagatgatgatgatgattcagactctgatggtgatggcaaaggaactggatgcatttcagccataccccattgaaatcgtgccagggaaggtcttcgttggcaatttcagtcaagcctgtgaccccaagattcagaaggacttgaaaatcaaagcccatgtcaatgtctccatggatacagggcccttttttgcaggcgatgctgacaagcttctgcacatccggatagaagattccccggaagcccagattcttcccttcttacgccacatgtgtcacttcattgaaattcaccatcaccttggctctgtcattctgatcttttccacccaaggtatcagccgcagttgtgccgccatcatagcctacctcatgcatagtaacgagcagaccttgcagaggtcctgggcctatgtcaagaagtgcaaaaacaacatgtgtccaaatcggggattggtgagccagctgctggaatgggagaagactatccttggagattccatcacaaacatcatggatccgctctactgatcttctccgaggcccaccgaagggtactgaagagcctcacctgggggcattttgtgggtggagggccagagtgtgtatacccaggcttgtctggaaggagaaggcctttgctgcctgaaagtctcatgtta

SEQ ID NO: 2537 - DNA, 1212 bp, Artificial; identical to SEQ ID NO: 2536
  cDNA Sequence

SEQ ID NO: 2538 - DNA, 1094 bp, Artificial
  cDNA Sequence
tgggttctagcgtagccgtctgtgtggccggtgggggacctgcggtcggagtgggagggccagtctgcacccaagaggtggaagaggacgggctttaggctggaagcgccttagaggagccatttttccaggtggggccccaggcagaggctccgacagggagcctggccatagtcgcgcagccggggaggtggagcgcgtcccagacccgagcccccgacctcagccaaacccattccttctgcccttggaggccagaggggactctgagctccggaaagcaggatgcctggtttgcttttatgtgaaccaacagagctttacaacatcctgaatcaggccacaaaactctccagattaacagaccccaactatctctgtttattggatgtccgttccaaatgggagtatgacgaaagccatgtgatcactgcccttcgagtgaagaagaaaaataatgaatatcttctcccggagtctgtggacctggagtgtgtgaagtactgcgtggtgtatgataacaacagcagcaccctggagatactcttaaaagatgatgatgatgattcagactctgatggtgatggcaaaggaactggatgcatttcagccataccccattgaaatcgtgccagggaaggtcttcgttggcaatttcagtcaagcctgtgaccccaagattcagaaggacttgaaaatcaaagcccatgtcaatgtctccatggatacagggcccttttttgcaggcgatgctgacaagcttctgcacatccggatagaagattccccggaagcccagattcttcccttcttacgccacatgtgtcacttcattgaggtcctgggcctatgtcaagaagtgcaaaaacaacatgtgtccaaatcggggattggtgagccagctgctggaatgggagaagactatccttggagattccatcacaaacatcatggatccgctctactgatcttctccgaggcccaccgaagggtactgaagagcctcacctgggggcattttgtgggtggagggccagagtgtgtatacccaggcttgtctggaaggagaaggcctttgctgcctgaaagtctca

SEQ ID NO: 2539 - DNA, 712 bp, Artificial
  cDNA Sequence
aagaaaaataatgaatatcttctcccggagtctgtggacctggagtgtgtgaagtactgcgtggtgtatgataacaacagcagcaccctggagatactcttaaaagatgatgatgatgattcagactctgatggtgatggcaaaggaactggatgcatttcagccataccccattgaaatcgtgccagggaaggtcttcgttggcaatttcagtcaagcctgtgaccccaagattcagaaggacttgaaaatcaaagcccatgtcaatgtctccatggatacagggcccttttttgcaggcgatgctgacaagcttctgcacatccggatagaagattccccggaagcccagattcttcccttcttacgccacatgtgtcacttcattggtatcagccgcagttgtgccgccatcatagcctacctcatgcatagtaacgagcagaccttgcagaggtcctgggcctatgtcaagaagtgcaaaaacaacatgtgtccaaatcggggattggtgagccagctgctggaatgggagaagactatccttggagattccatcacaaacatcatggatccgctctactgatcttctccgaggcccaccgaagggtactgaagagcctcacctgggggcattttgtgggtggagggccagagtgtgtatacccaggcttgtctggaaggagaaggcctttgctgcctgaaagtctca

SEQ ID NO: 2540 - DNA, 655 bp, Artificial
  cDNA Sequence
agatcttgtgcctcaagcagccattgagtatggcaggatcctgacccgcctcacccaccaccccgtctacatcctgaaagggggctatgagcgcttctcaggcacgtaccactttctccggacccagaagatcatctggatgcctcaggaactggatgcatttcagccataccccattgaaatcgtgccagggaaggtcttcgttggcaatttcagtcaagcctgtgaccccaagattcagaaggacttgaaaatcaaagcccatgtcaatgtctccatggatacagggcccttttttgcaggcgatgctgacaagcttctgcacatccggatagaagattccccggaagcccagattcttcccttcttacgccacatgtgtcacttcattgaggtcctgggcctatgtcaagaagtgcaaaaacaacatgtgtccaaatcggggattggtgagccagctgctggaatgggagaagactatccttggagattccatcacaaacatcatggatccgctctactgatcttctccgaggcccaccgaagggtactgaagagcctcacctgggggcattttgtgggtggagggccagagtgtgtatacccaggcttgtctggaaggagaaggcctttgctgcctgaaagtctcatgtta

SEQ ID NO: 2541 - DNA, 763 bp, Artificial
  cDNA Sequence
agatcttgtgcctcaagcagccattgagtatggcaggatcctgacccgcctcacccaccaccccgtctacatcctgaaagggggctatgagcgcttctcaggcacgtaccactttctccggacccagaagatcatctggatgcctcaggaactggatgcatttcagccataccccattgaaatcgtgccagggaaggtcttcgttggcaatttcagtcaagcctgtgaccccaagattcagaaggacttgaaaatcaaagcccatgtcaatgtctccatggatacagggcccttttttgcaggcgatgctgacaagcttctgcacatccggatagaagattccccggaagcccagattcttcccttcttacgccacatgtgtcacttcattgaaattcaccatcaccttggctctgtcattctgatcttttccacccaaggtatcagccgcagttgtgccgccatcatagcctacctcatgcatagtaacgagcagaccttgcagaggtcctgggcctatgtcaagaagtgcaaaaacaacatgtgtccaaatcggggattggtgagccagctgctggaatgggagaagactatccttggagattccatcacaaacatcatggatccgctctactgatcttctccgaggcccaccgaagggtactgaagagcctcacctgggggcattttgtgggtggagggccagagtgtgtatacccaggcttgtctggaaggagaaggcctttgctgcctgaaagtctca

SEQ ID NO: 2542 - DNA, 621 bp, Artificial
  cDNA Sequence
cttcaggaactggatgcatttcagccataccccattgaaatcgtgccagggaaggtcttcgttggcaatttcagtcaagcctgtgaccccaagattcagaaggacttgaaaatcaaagcccatgtcaatgtctccatggatacagggcccttttttgcaggcgatgctgacaagcttctgcacatccggatagaagattccccggaagcccagattcttcccttcttacgccacatgtgtcacttcattgaaattcaccatcaccttggctctgtcattctgatcttttccacccaaggtatcagccgcagttgtgccgccatcatagcctacctcatgcatagtaacgagcagaccttgcagaggtcctgggcctatgtcaagaagtgcaaaaacaacatgtgtccaaatcggggattggtgagccagctgctggaatgggagaagactatccttggagattccatcacaaacatcatggatccgctctactgatcttctccgaggcccaccgaagggtactgaagagcctcacctgggggcattttgtgggtggagggccagagtgtgtatacccaggcttgtctggaaggagaaggcctttgctgcctgaaagtctca

SEQ ID NO: 2543 - DNA, 372 bp, Artificial
  cDNA Sequence
gaaattcaccatcaccttggctctgtcattctgatcttttccacccaaggtatcagccgcagttgtgccgccatcatagcctacctcatgcatagtaacgagcagaccttgcagaggtcctgggcctatgtcaagaagtgcaaaaacaacatgtgtccaaatcggggattggtgagccagctgctggaatgggagaagactatccttggagattccatcacaaacatcatggatccgctctactgatcttctccgaggcccaccgaagggtactgaagagcctcacctgggggcattttgtgggtggagggccagagtgtgtatacccaggcttgtctggaaggagaaggcctttgctgcctgaaagtctca

SEQ ID NO: 2544 - DNA, 858 bp, Artificial
  cDNA Sequence
ggcggaggagcctcgggtgggccggggttgctgcgccgtcctccactactggctactggcgctgcagccatgcagcccccgcccccgggcccgctgggcgactgcctgcgggactgggaggatctacagcaggacttccagaacatccaggagacccatcggctctaccgcctgaagctggaggagctgaccaaactttagaacaattgcaccagctccatcacgcggcagaagaagcggctccaggagctggccctcgccctgaagaaatgcaaaccctccctcccagcagaggccgagggggccgcacaggagctggagaaccagatgaaagagcgccaaggcctcttctttgacatggaggcctatttgcctaagaagaatggattgtacctgagcctggttctggggaacgtcaacgtcacgctcctgagcaagcaggctaagtttgcctacaaggacgagtatgagaagttcaagctctacctcaccatcatcctcatcctcatctccttcacttgccgcttcctgctcaactccagggtgacagatgctgccttcaacttcctgctggtctggtactactgcaccctgaccatccgggagagcatcctcatcaacaacggctcccggatcaaaggctggtgggtgttccatcactacgtgtccaccttcctgtcgggagtcatgctgacgtggcccgacggtctcatgtaccagaaattccggaaccaattcctctccttttccatgtaccagagcttcgtgcagtttctccagtactactaccagagcggctgcctctaccgcctgcgggcgctgggcgagcggcacaccatggacctcactgtgggtgag

SEQ ID NO: 2545 - DNA, 721 bp, Artificial
  cDNA Sequence
ggcggaggagcctcgggtgggccggggttgctgcgccgtcctccactactggctactggcgctgcagccatgcagcccccgcccccgggcccgctgggcgactgcctgcgggactgggaggatctacagcaggacttccagaacatccaggagacccatcggctctaccgcctgaagctggaggagctgaccaaactttagaacaattgcaccagctccatcacgcggcagaagaagcggctccaggagctggccctcgccctgaagaaatgcaaaccctccctcccagcagaggccgagggggccgcacaggagctggagaaccagatgaaagagcgccaaggcctcttctttgacatggaggcctatttgcctaagaagaatggattgtacctgagcctggttctggggaacgtcaacgtcacgctcctgagcaagcaggctaagtttgcctacaaggacgagtatgagaagttcaagctctacctcaccatcatcctcatcctcatctccttcacttgccgcttcctgctcaactccagggtgacagatgctgccttcaacttcctgctggtctggtactactgcaccctgaccatccgggagagcatcctcatcaacaacggctcccggcttcgtgcagtttctccagtactactaccagagcggctgcctctaccgcctgcgggcgctgggcgagcggcacaccatggacctcact

SEQ ID NO: 2546 - DNA, 796 bp, Artificial
  cDNA Sequence
ggcggaggagcctcgggtgggccggggttgctgcgccgtcctccactactggctactggcgctgcagccatgcagcccccgcccccgggcccgctgggcgactgcctgcgggactgggaggatctacagcaggacttccagaacatccaggagacccatcggctctaccgcctgaagctggaggagctgaccaaactttagaacaattgcaccagctccatcacgcggcagaagaagcggctccaggagctggccctcgccctgaagaaatgcaaaccctccctcccagcagaggccgagggggccgcacaggagctggagaaccagatgaaagagcgccaaggcctcttctttgacatggaggcctatttgcctaagaagaatggattgtacctgagcctggttctggggaacgtcaacgtcacgctcctgagcaagcaggctaagtttgcctacaaggacgagtatgagaagttcaagctctacctcaccatcatcctcatcctcatctccttcacttgccgcttcctgctcaactccagggtgacagatgctgccttcaacttcctgctggtctggtactactgcaccctgaccatccgggagagcatcctcatcaacaacggctcccggatcaaaggctggtgggtgttccatcactacgtgtccaccttcctgtcgggagtcatgctgacgtggcccgacggtctcatgtaccagaaattccggaaccaattcctctccttttccatgtaccagagcttcgtgcagtttctccagtactactaccagagcg

SEQ ID NO: 2547 - DNA, 860 bp, Artificial
  cDNA Sequence
ggcggaggagcctcgggtgggccggggttgctgcgccgtcctccactactggctactggcgctgcagccatgcagcccccgcccccgggcccgctgggcgactgcctgcgggactgggaggatctacagcaggacttccagaacatccaggagacccatcggctctaccgcctgaagctggaggagctgaccaaactttagaacaattgcaccagctccatcacgcggcagaagaagcggctccaggagctggccctcgccctgaagaaatgcaaaccctccctcccagcagaggccgagggggccgcacaggagctggagaaccagatgaaagagcgccaaggcctcttctttgacatggaggcctatttgcctaagaagaatggattgtacctgagcctggttctggggaacgtcaacgtcacgctcctgagcaagcaggctaagtttgcctacaaggacgagtatgagaagttcaagctctacctcaccatcatcctcatcctcatctccttcacttgccgcttcctgctcaactccagggtgacagatgctgccttcaacttcctgctggtctggtactactgcaccctgaccatccgggagagcatcctcatcaacaacggctcccggtgggcagggcgggccctgagggaggggagcatggaatggggtgccaggaccctccgggaagcaggaacaggcgctgggggtgatggtggctctctgctccaggatcaaaggctggtgggtgttccatcactacgtgtccaccttcctgtcgggagtcatgctgacgtggcccgacggtctcatgtaccagaaattccggaaccaattcctctccttttccatgtacc

SEQ ID NO: 2548 - DNA, 920 bp, Artificial
  cDNA Sequence
ggcggaggagcctcgggtgggccggggttgctgcgccgtcctccactactggctactggcgctgcagccatgcagcccccgcccccgggcccgctgggcgactgcctgcgggactgggaggatctacagcaggacttccagaacatccaggagacccatcggctctaccgcctgaagctggaggagctgaccaaactttagaacaattgcaccagctccatcacgcggcagaagaagcggctccaggagctggccctcgccctgaagaaatgcaaaccctccctcccagcagaggccgagggggccgcacaggagctggagaaccagatgaaagagcgccaaggcctcttctttgacatggaggcctatttgcctaagaagaatggattgtacctgagcctggttctggggaacgtcaacgtcacgctcctgagcaagcaggctaagtttgcctacaaggacgagtatgagaagttcaagctctacctcaccatcatcctcatcctcatctccttcacttgccgcttcctgctcaactccagggtgacagatgctgccttcaacttcctgctggtctggtactactgcaccctgaccatccgggagagcatcctcatcaacaacggctcccggtgggcagggcgggccctgagggaggggagcatggaatggggtgccaggaccctccgggaagcaggaacaggcgctgggggtgatggtggctctctgctccaggatcaaaggctggtgggtgttccatcactacgtgtccaccttcctgtcgggagtcatgctgacgtggtgagtggctgggccccggcaggggcaggagctgggacaaggaggggatacacggcatccccaagggtccccacactgccctccactttttaccttaggcccgacggtctcatgtacca

SEQ ID NO: 2549 - DNA, 535 bp, Artificial
  cDNA Sequence
gcacagccacagggaggaatggtggagctggggacagacatcggcagctactgccaactgctgccctcttctgccacgagttccttggcgaggagccttgtccgtgttactaaagagccacgtgactttatctgatggcagaacgtctcgctttctgcatctgtaagctgggccagtacaccgtactccacagggctgccgtgagtacagatgagactgaaacaggggcattgatcaaagtacccaacacagagcctggcacatagaggtgttcaataagtaacttttgtcaggagactcttagggaggaccttcagaaggccaagtgagatgacttccctagaaattctctcagggcatggggaccctggaggactccttggagcctgcagcccctggaacaggcgaggcccggaaaccagcagcgagagcagcgcagtgaagaaggtggcggatggcacctcgggacacaagcaccagctgcgacacccgggccccgaggccgccatggccgccgtcgttcccgcgccccgcc

SEQ ID NO: 2550 - DNA, 465 bp, Artificial
  cDNA Sequence
ctggaattgaggctgagccaaagaccccagggccgtctcagtctcataaaaggggatcaggcaggaggagtttgggagaaacctgagaagggcctgatttgcagcatcatgatgggcctctccttggcctctgctgtgctcctggcctccctcctgagtctccaccttggaactgccacacgtgggagtgacatatccaagacctgctgcttccaatacagccacaagccccttccctggacctgggtgcgaagctatgaattcaccagtaacagctgctcccagcgggctgtgatattcactaccaaaagaggcaagaaagtctgtacccatccaaggaaaaaatgggtgcaaaaatacatttctttactgaaaactccgaaacaattgtgactcagctgaattttcatccgaggacgcttggaccccgctcttggctctgcagccctctggggagcctgcgga

SEQ ID NO: 2551 - DNA, 640 bp, Artificial
  cDNA Sequence
gcgggaggcgcggcgcggggggggtcgggtgcgcggcgggcggcccctccccctgccaggtccgggcgggtgcctggagccgccagagtttccgcacccgggagggagatgcggccggggctcaggctccttgcagttgtaatttagattcgagaagtggtttatcctttgactggaaaagaaaagtagctgcagtattcccccagcacttgctgagagcatgccgtatgccaggctgtgaggctcgagagacaagcagtggaagagttgcggcctgtttcatctctggattgtaaatctgagcctccttctggcccctggaaggggacagcatcaccatggaatggtgtgtcccgttgcctgttggatctgtctccatcttcactcagacagaaggctatagaaagatgcctgtgacttcagattcctaaccagcataatgctggagccgggagccaccaacctgcagttttcagaatggccgtgttggacactgatttggatcacattcttccatcttctgttcttcctccattctgggctaagttagtagtgggatcggttgccattgtgtgttttgcacgcagctatgatggagactttgtctttgatgactcagaagctattgttaacaataagg

SEQ ID NO: 2552 - DNA, 723 bp, Artificial
  cDNA Sequence
gccaggtccgggcgggtgcctggagccgccagagtttccgcacccgggagggagatgcggccggggctcaggctccttgcagattcctaaccagcataatgctggagccgggagccaccaacctgcagttttcagaatggccgtgttggacactgatttggatcacattcttccatcttctgttcttcctccattctgggctaagttagtagtgggatcggttgccattgtgtgttttgcacgcagctatgatggagactttgtctttgatgactcagaagctattgttaacaataaggacctccaagcagaaacgcccctgggggacctgtggcatcatgacttctggggcagtagactgagcagcaacaccagccacaagtcctaccggcctctcaccgtcctgactttcaggattaactactacctctcgggaggcttccaccccgtgggctttcacgtggtcaacatcctcctgcacagtggcatctctgtcctcatggtggacgtcttctcggttctgtttggcggcctgcagtacaccagtaaaggccggaggctgcacctcgcccccagggcgtccctgctggccgcgctgctgtttgctgtccatcctgtgcacaccgagtgtgttgctggtgttgtcggccgtgcagacctcctgtgtgccctgttcttcttgttatctttccttggctactgtaaagcatttagagaaagtaa

SEQ ID NO: 2553 - DNA, 824 bp, Artificial
  cDNA Sequence
tggagccgccagagtttccgcacccgggagggagatgcggccggggctcaggctccttgcagttgtaatttagattcgagaagtggtttatcctttgactggaaaagaaaagtagctgcagtattcccccagcacttgctgagagcatgccgtatgccaggctgtgaggctcgagagacaagcagtggaagagttgcggcctgtttcatctctggattgtaaatctgagcctccttctggcccctggaaggggacagcatcaccatggaatgattcctaaccagcataatgctggagccgggagccaccaacctgcagttttcagaatggccgtgttggacactgatttggatcacattcttccatcttctgttcttcctccattctgggctaagttagtagtgggatcggttgccattgtgtgttttgcacgcagctatgatggagactttgtctttgatgactcagaagctattgttaacaataaggacctccaagcagaaacgcccctgggggacctgtggcatcatgacttctggggcagtagactgagcagcaacaccagccacaagtcctaccggcctctcaccgtcctgactttcaggattaactactacctctcgggaggcttccaccccgtgggctttcacgtggtcaacatcctcctgcacagtggcatctctgtcctcatggtggacgtcttctcggttctgtttggcggcctgcagtacaccagtaaaggccggaggctgcacctcgcccccagggcgtccctgctggccgcgctgctgtttgctgtccatcctgtgcacaccgagtgtgta

SEQ ID NO: 2554 - DNA, 939 bp, Artificial
  cDNA Sequence
ctcaagccatccaccggcctcggcctcccaaagtgctgggattacaggcgtgagccattgcaaccagccttgatttgttgttttttaagtagcaggagtaatttctttagctgaaatgtaagcatagaggttggggtctgtgtgctaacctgtgttgtgtttgcagttgtaatttagattcgagaagtggtttatcctttgactggaaaagaaaagtagctgcagtattcccccagcacttgctgagagcatgccgtatgccaggctgtgaggctcgagagacaagcagtggaagagttgcggcctgtttcatctctggattgtaaatctgagcctccttctggcccctggaaggggacagcatcaccatggaatgattcctaaccagcataatgctggagccgggagccaccaacctgcagttttcagaatggccgtgttggacactgatttggatcacattcttccatcttctgttcttcctccattctgggctaagttagtagtgggatcggttgccattgtgtgttttgcacgcagctatgatggagactttgtctttgatgactcagaagctattgttaacaataaggtttgtatctcaactcttttctggtaaacttaactgcccaactgtgtctcagtaatcatctaagtatgtgttgcattgttctctgtggaatgtaggttaagcattggcctgggccccgatggtgctctcgatttttctctcttttcaacatcgcctccatgatttagtgcctttcttattgctggcaccaaggttctgaacccctgcctcagctcaggcactcccctcaagagctccagtccacatatggatcaaagaggccgttattctaagattacaaggcaagggcattgcagggtgttgcagacttagtattccagattttgcaaaacatttccacagttgtt

SEQ ID NO: 2555 - DNA, 816 bp, Artificial
  cDNA Sequence
tttatgtacctggaaatgatgaaaagaaaataaagaagattccatccctgaatgtagattgtgcagtgctcgactgtgaggatggagtggctgcaaacaaaaagaatgaagctcgactgagaattgtaaaaactcttgaagacattgatctgggccctactgaaaaatgtgtgagagtcaactcagtttccagtggtctggcggaagaagacctagagacccttttgcaatcccgggtccttccttccagcctgatgctaccaaaggtggaaagtcctgaagaaatccagtggtttgcagacaaattttcattccacttaaaaggccgaaaacttgaacaaccaatgaatttaatcccttttgtggaaactgcaatgggtttgctcaattttaaggcagtgtgtgaagaaaccctgaaggtcgggcctcaagtaggtctctttctagatgcagtcgtttttggaggagaagactttcgagccagcataggtgtcaaagacatctctctctctctttttctgtgtgtgtgtgtgtatatgtgtgtatatattttttctttgcccctcaaggatggacatttacataacaatgtatatttgccaaccatgacaatggtttttcatgacaatggaatggacactacttcctgataatttagggctcctcatagctgccctgcttctagagcactgcattattacttctgttcatttataaaagacacgagcaatagaaagcctgttgcagccccaggcatgctcaggaatatatggcatctcctttgctcctaataaatatattatgtgaacagcctca

SEQ ID NO: 2556 - DNA, 685 bp, Artificial
  cDNA Sequence
tgaatttaatcccttttgtggaaactgcaatgggtttgctcaattttaaggcagtgtgtgaagaaaccctgaaggtcgggcctcaagtaggtctctttctagatgcagtcgtttttggaggagaagactttcgagccagcataggtgcaacaagtagtaaagaaaccctggatattctctacgcccggcaaaagattgttgtcatagcgaaagcctttggtctccaagccatagatctggtgtacattgactttcgagatggagctgggctgcttagacagtcacgagaaggagccgccatgggcttcactggtaagcaggtgattcaccctaaccaaattgccgtggtccaggagcagttttctccttcccctgaaaaaattaagtgggctgaagaactgattgctgcctttaaagaacatcaacaattaggaaagggggcctttactttccaagggagtatgatcgacatgccattactgaagcaggcccagaacactgttacgcttgccacctccatcaaggaaaaatgatctgttaaatgaagctgtcatcaggctaaagggtattgaagctgcagagggatcaacttgtgcttgccagaggacgccaatgaagtttgaaacaccaacaatcagagattttgtttctgttcctcattaaatcatgagcttttgtgccgaga

SEQ ID NO: 2557 - DNA, 648 bp, Artificial
  cDNA Sequence
tgctcttttacaggcagtgtgtgaagaaaccctgaaggtcgggcctcaagtaggtctctttctagatgcagtcgtttttggaggagaagactttcgagccagcataggtgcaacaagtagtaaagaaaccctggatattctctacgcccggcaaaagattgttgtcatagcgaaagcctttggtctccaagccatagatctggtgtacattgactttcgagatggagctgggctgcttagacagtcacgagaaggagccgccatgggcttcactggtaagcaggtgattcaccctaaccaaattgccgtggtccaggagcagttttctccttcccctgaaaaaattaagtgggctgaagaactgattgctgcctttaaagaacatcaacaattaggaaagggggcctttactttccaagggagtatgatcgacatgccattactgaagcaggcccagaacactgttacgcttgccacctccatcaaggaaaaatgatctgttaaatgaagctgtcatcaggctaaagggtattgaagctgcagagggatcaacttgtgcttgccagaggacgccaatgaagtttgaaacaccaacaatcagagattttgtttctgttcctcattaaatcatgagcttttgtgccgaga

SEQ ID NO: 2558 - DNA, 1610 bp, Artificial
  cDNA Sequence
cctcaagtaggtctctttctagatgcagtcgtttttggaggagaagactttcgagccagcataggtgcaacaagtagtaaagaaaccctggatattctctacgcccggcaaaagattgttgtcatagcgaaagcctttggtctccaagccatagatctggtgtacattgactttcgagatggagctgggctgcttagacagtcacgagaaggagccgccatgggcttcactggtaagcaggtgattcaccctaaccaaattgccgtggtccaggagcagttttctccttcccctgaaaaaattaagtgggctgaagaactgattgctgcctttaaagaacatcaacaattaggaaagggggcctttactttccaagggagtatgatcgacatgccattactgaagcaggcccagaacactgttacgcttgccacctccatcaaggaaaaatgatctgttaaatgaagctgtcatcaggtgggctgaacatatacagtggggttcttaaagacaaaccacaatactcaaagcaacttgttaggatgccagattgggacctgactccatttacagttcatgttaatcacaattttgttgttgttgtctcactggccagttattcccctaaaaaaatgaacgcttttccctttggatccaagcttatgattttatcatttttagtgtattacgaatatgggcttatgatttcacagggaggtaagatcctggggaaagatgggctgtgaggcgaaggtaggtctttaatgaaatggatctttcccaaatagacatattccctccacccttctcatgttagtaaatgtttcctgcttgttcatttatacagctgacaccacaaataattttaagaaaagccaggcctttaaaacatagtagcaacattaaggggtcatctctatttcactagtaatctgataaaacaacagagatggcatcaaaaaagaatactaagtattatattggcttaaaaagacactttctgaaaataaactttcgaaactggttactattaacctccacccctaaaacgaaacatccatctccttgaaccgctagacgatgaacacgaaagctgtcatcctgggtgaatgctgtgagtcaaccattaccggcaattaaaaaataaatgtgcagaaacacaagaccatccattctccccctttattttcccgtttaactgtttgccattgaggctatttccccctggaaatgtatggctgggacaggactccctcagtcataaacttgtagcgtctcagaagacacaatgcacccgagctggtgcatgtggcccctgcgagatttgcatcacattagagatgcggctgcaggtcagatgggtggtgtggttaacgggcttagtaaagctgttttgaagaggttaacccagcttgtagtaagggtaaataaacataacaaccagccattgttccctattcagcatgtactcttatattgaaggctaaagggtattgaagctgcagagggatcaacttgtgcttgccagaggacgccaatgaagtttgaaacaccaacaatcagagattttgtttctgttcctcattaaatcatgagcttttgtgccgaga

SEQ ID NO: 2559 - DNA, 386 bp, Artificial; identical to SEQ ID NO: 1151
  cDNA Sequence

SEQ ID NO: 2560 - DNA, 397 bp, Artificial
  cDNA Sequence
gcattcagccttttccatcatcaccaggtcagcggtcacagagcatctcccgtgtacctggcaggtactgggtgctgggtgccaggtcctgggagtcaaagggggcctttactttccaagggagtatgatcgacatgccattactgaagcaggcccagaacactgttacgcttgccacctccatcaaggaaaaatgatctgttaaatgaagctgtcatcaggtgggctgaacatatacagtggggttcttaaagacaaaccacaatactcaaagcaacttgttaggatgccagattgggacctgactccatttacagttcatgttaatcacaattttgttgttgttgtctcactggccagttattcccctaaaaaaatgaacgcttttccctttgga

SEQ ID NO: 2561 - DNA, 1103 bp, Artificial
  cDNA Sequence
gcggccgcagcgctcgggccccacgccgcgcacgttggctcctactctgggccgcccttcaactccacccgggacttcctgttccgcagccgcggcttcggggactcggcgccgggcggcgggcagcacgggctgttcgggccgggcgcgggcggcctgcaccacgcgcactcggacgcgcagggccacctcctcttcccgggcctgccagagcagcacgggccgcacggctcgcagaatgtgctcaacgggcagatgcgcctcgggctgcccggcgaggtgttcgggcgctcggagcaataccgccaggtggccagcccgcggaccgacccctactcggcggcgcaactccacaaccagtacggccccatgaatatgaacatgggtatgaacatggcagcagccgcggcccaccaccaccaccaccaccaccaccaccccggtgcctttttccgctatatgcggcagcagtgcatcaagcaggagctaatctgcaagtggatcgaccccgagcaactgagcaatcccaagaagagctgcaacaaaactttcagcaccatgcacgagctggtgacacacgtctcggtggagcacgtcggcggcccggagcagagcaaccacgtctgcttctgggaggagtgtccgcgcgagggcaagcccttcaaggccaaatacaaactggtcaaccacatccgcgtgcacacaggcgagaaacccttcccctgccccttcccgggctgtggcaaagtcttcgcgcgctccgagaacctcaagatccacaaaaggacccacacaggggagaagccgttccagtgtgagtttgagggctgcgaccggcgcttcgccaacagcagcgacaggaagaagcacatgcacgtccacacctccgataagccctatctctgcaagatgtgcgacaagtcctacacgcaccccagctcgctgcggaagcacatgaaggtccatgagtcctccccgcagggctctgaatcctccccggccgccagctccggctatgagtcgtccacgcccccggggctggtgtcccccagcgccgagccccagagcagctccaacctgtccccagcggcggcggcagcggc

SEQ ID NO: 2562 - DNA, 455 bp, Artificial; identical to SEQ ID NO: 1159
  cDNA Sequence

SEQ ID NO: 2563 - DNA, 383 bp, Artificial; identical to SEQ ID NO: 1156
  cDNA Sequence

SEQ ID NO: 2564 - DNA, 473 bp, Artificial; identical to SEQ ID NO: 1157
  cDNA Sequence

SEQ ID NO: 2565 - DNA, 376 bp, Artificial
  cDNA Sequence
cacaggggagaagccgttccagtgtgagtttgagggctgcgaccggcgcttcgccaacagcagcgacaggaagaagcacatgcacgtccacacctccgataagccctatctctgcaagatgtgcgacaagtcctacacgcaccccagctcgctgcggaagcacatgaagtcccctctggtcccccctcccggcttttgtcttgcaggtccatgagtcctccccgcagggctctgaatcctccccggccgccagctccggctatgagtcgtccacgcccccggggctggtgtcccccagcgccgagccccagagcagctccaacctgtccccagcggcggcggcagcggcggcggcggctgcggcggcggcggccgc

SEQ ID NO: 2566 - DNA, 219 bp, Artificial
  cDNA Sequence
gtgtccgcggtgcaccggggcggaggctcgggcagtggcggcgcgggaggcggctcaggcggcggcagcggcagtggcgggggcggcggcggggcgggcggcgggggcggcggcagctctggcgggggcagcgggacagccgggggtcacagcggcctctcctccaacttcaatgaatggcatgaagagcaaaaatatcccttccggagtctttgaagc

SEQ ID NO: 2567 - DNA, 1422 bp, Artificial
  cDNA Sequence
ccggctgtgtgagaggtcagcagaggggcggtctgcggggacaacaatggcggggttctgggtcgggacagcaccgctggtcgctgccggacggcgtgggcggtggccgccgcagcagctgatgctgagcgcggcgctgcggaccctgaagcatgttctgtactattcaagacagtgcttaatggtgtcccgtaatcttggttcagtgggatatgatcctaatgaaaaaacttttgataaaattcttgttgctaatagaggagaaattgcatgtcgggtgagtagaattttcaacttgcaagaagatgggcattaagacagttgccatccacagtgatgttgatgctagttctgttcatgtgaaaatggcggatgaggctgtctgtgttggcccagctcccaccagtaaaagctacctcaacatggatgccatcatggaagccattaagaaaaccagggcccaagctgtacatccaggttatggattcctttcagaaaacaaagaatttgccagatgtttggcagcagaagatgtcgttttcattggacctgacacacatgctattcaagccatgggcgacaagattgaaagcaaattattagctaagaaagcagaggttaatacaatccctggctttgatggagtagtcaaggatgcagaagaagctgtcagaattgcaagggaaattggctaccctgtcatgatcaaggcctcagcaggtggtggtgggaaaggcatgcgcattgcttgggatgatgaagagaccagattgtcatctcaagaagctgcttctagttttggcgatgatagactactaatagaaaaatttattgataatcctcgtcatatagaaatccaggttctaggtgataaacatgggaatgctttatggcttaatgaaagagagtgctcaattcagagaagaaatcagaaggtggtggaggaagcaccaagcatttttttggatgcggagactcgaagagcgatgggagaacaagctgtagctcttgccagagcagtaaaatattcctctgctgggaccgtggagttccttgtggactctaagaagaatttttatttcttggaaatgaatacaagactccaggttgagcatcctgtcacagaatgcattactggcctggacctagtccaggaaatgatccgtgttgctaagggctaccctctcaggcacaaacaagctgatattcgcatcaacggctgggcagttgaatgtcgggtttatgctgaggacccctacaagtcttttggtttaccatctattgggagattgtctcagtaccaagaaccgttacatctacctggtgtccgagtggacagtggcatccaaccaggaagtgatattagcatttattatgatcctatgatttcaaaactaatcacatatggctctgatagaactg

SEQ ID NO: 2568 - DNA, 1403 bp, Artificial
  cDNA Sequence
tctgcggggacaacaatggcggggttctgggtcgggacagcaccgctggtcgctgccggacggcgtgggcggtggccgccgcagcagctgatgctgagcgcggcgctgcggaccctgaagcatgttctgtactattcaagacagtgcttaatggtgtcccgtaatcttggttcagtgggatatgatcctaatgaaaaaacttttgataaaattcttgttgctaatagaggagaaattgcatgtcgggtgagtagaattttcaacttgcaagaagatgggcattaagacagttgccatccacagtgatgttgatgctagttctgttcatgtgaaaatggcggatgaggctgtctgtgttggcccagctcccaccagtaaaagctacctcaacatggatgccatcatggaagccattaagaaaaccagggcccaagctgtacatccaggttatggattcctttcagaaaacaaagaatttgccagatgtttggcagcagaagatgtcgttttcattggacctgacacacatgctattcaagccatgggcgacaagattgaaagcaaattattagctaagaaagcagaggttaatacaatccctggctttgatggagtagtcaaggatgcagaagaagctgtcagaattgcaagggaaattggctaccctgtcatgatcaaggcctcagcaggtggtggtgggaaaggcatgcgcattgcttgggatgatgaagagaccagggatggttttagattgtcatctcaagaagctgcttctagttttggcgatgatagactactaatagaaaaatttattgataatcctcgtcatatagaaatccaggttctaggtgataaacatgggaatgctttatggcttaatgaaagagagtgctcaattcagagaagaaatcagaaggtggtggaggaagcaccaagcatttttttggatgcggagactcgaagagcgatgggagaacaagctgtagctcttgccagagcagtaaaatattcctctgctgggaccgtggagttccttgtggactctaagaagaatttttatttcttggaaatgaatacaagactccaggttgagcatcctgtcacagaatgcattactggcctggacctagtccaggaaatgatccgtgttgctaagggctaccctctcaggcacaaacaagctgatattcgcatcaacggctgggcagttgaatgtcgggtttatgctgaggacccctacaagtcttttggtttaccatctattgggagattgtctcagtaccaagaaccgttacatctacctggtgtccgagtggacagtggcatccaaccaggaagtgatattagcatttattatgatcctatgatttcaaaactaatcacatatggctctgatagaactg

SEQ ID NO: 2569 - DNA, 1314 bp, Artificial
  cDNA Sequence
aacaatggcggggttctgggtcgggacagcaccgctggtcgctgccggacggcgtgggcggtggccgccgcagcagctgatgctgagcgcggcgctgcggaccctgaagacttttgataaaattcttgttgctaatagaggagaaattgcatgtcgggtgagtagaattttcaacttgcaagaagatgggcattaagacagttgccatccacagtgatgttgatgctagttctgttcatgtgaaaatggcggatgaggctgtctgtgttggcccagctcccaccagtaaaagctacctcaacatggatgccatcatggaagccattaagaaaaccagggcccaagctgtacatccaggttatggattcctttcagaaaacaaagaatttgccagatgtttggcagcagaagatgtcgttttcattggacctgacacacatgctattcaagccatgggcgacaagattgaaagcaaattattagctaagaaagcagaggttaatacaatccctggctttgatggagtagtcaaggatgcagaagaagctgtcagaattgcaagggaaattggctaccctgtcatgatcaaggcctcagcaggtggtggtgggaaaggcatgcgcattgcttgggatgatgaagagaccagggatggttttagattgtcatctcaagaagctgcttctagttttggcgatgatagactactaatagaaaaatttattgataatcctcgtcatatagaaatccaggttctaggtgataaacatgggaatgctttatggcttaatgaaagagagtgctcaattcagagaagaaatcagaaggtggtggaggaagcaccaagcatttttttggatgcggagactcgaagagcgatgggagaacaagctgtagctcttgccagagcagtaaaatattcctctgctgggaccgtggagttccttgtggactctaagaagaatttttatttcttggaaatgaatacaagactccaggttgagcatcctgtcacagaatgcattactggcctggacctagtccaggaaatgatccgtgttgctaagggctaccctctcaggcacaaacaagctgatattcgcatcaacggctgggcagttgaatgtcgggtttatgctgaggacccctacaagtcttttggtttaccatctattgggagattgtctcagtaccaagaaccgttacatctacctggtgtccgagtggacagtggcatccaaccaggaagtgatattagcatttattatgatcctatgatttcaaaactaatcacatatggctctgatagaactg

SEQ ID NO: 2570 - DNA, 1369 bp, Artificial
  cDNA Sequence
ggacagcaccgctggtcgctgccggacggcgtgggcggtggccgccgcagcagctgatgctgagcgcggcgctgcggaccctgaagcatgttctgtactattcaagacagtgcttaatggtgtcccgtaatcttggttcagtgggatatgatcctaatgaaaaaacttttgataaaattcttgttgctaatagaggagaaattgcatgtcgggtgagtagaattttcaacttgcaagaagatgggcattaagacagttgccatccacagtgatgttgatgctagttctgttcatgtgaaaatggcggatgaggctgtctgtgttggcccagctcccaccagtaaaagctacctcaacatggatgccatcatggaagccattaagaaaaccagggcccaagctgtacatccaggttatggattcctttcagaaaacaaagaatttgccagatgtttggcagcagaagatgtcgttttcattggacctgacacacatgctattcaagccatgggcgacaagattgaaagcaaattattagctaagaaagcagaggttaatacaatccctggctttgatggagtagtcaaggatgcagaagaagctgtcagaattgcaagggaaattggctaccctgtcatgatcaaggcctcagcaggtggtggtgggaaaggcatgcgcattgcttgggatgatgaagagaccagggatggttttagattgtcatctcaagaagctgcttctagttttggcgatgatagactactaatagaaaaatttattgataatcctcgtcatatagaaatccaggttctaggtgataaacatgggaatgctttatggcttaatgaaagagagtgctcaattcagagaagaaatcagaaggtggtggaggaagcaccaagcatttttttggatgcggagactcgaagagcgatgggagaacaagctgtagctcttgccagagcagtaaaatattcctctgctgggaccgtggagttccttgtggactctaagaagaatttttatttcttggaaatgaatacaagactccaggttgagcatcctgtcacagaatgcattactggcctggacctagtccaggaaatgatccgtgttgctaagggctaccctctcaggcacaaacaagctgatattcgcatcaacggctgggcagttgaatgtcgggtttatgctgaggacccctacaagtcttttggtttaccatctattgggagattgtctcagtaccaagaaccgttacatctacctggtgtccgagtggacagtggcatccaaccaggaagtgatattagcatttattatgatcctatgatttcaaaactaatcacatatggctctgatagaactg

SEQ ID NO: 2571 - DNA, 1020 bp, Artificial
  cDNA Sequence
gtgcttcctgccagctcatttcaactgctttgagtttcttaatataataatgatgaggtagaatttacattccacttatggtattaattttacatttctctgaatgaaaagggttagaaggtagtaaaattgaacattaaatgaatcggaggagacagtagtgcaatatatgactgccctaaagacattgtgcaatgcctcatgggattaatgttgagtctcatttcctgcttttacaggatgcagaagaagctgtcagaattgcaagggaaattggctaccctgtcatgatcaaggcctcagcaggtggtggtgggaaaggcatgcgcattgcttgggatgatgaagagaccagggatggttttagattgtcatctcaagaagctgcttctagttttggcgatgatagactactaatagaaaaatttattgataatcctcgtcatatagaaatccaggttctaggtgataaacatgggaatgctttatggcttaatgaaagagagtgctcaattcagagaagaaatcagaaggtggtggaggaagcaccaagcatttttttggatgcggagactcgaagagcgatgggagaacaagctgtagctcttgccagagcagtaaaatattcctctgctgggaccgtggagttccttgtggactctaagaagaatttttatttcttggaaatgaatacaagactccaggttgagcatcctgtcacagaatgcattactggcctggacctagtccaggaaatgatccgtgttgctaagggctaccctctcaggcacaaacaagctgatattcgcatcaacggctgggcagttgaatgtcgggtttatgctgaggacccctacaagtcttttggtttaccatctattgggagattgtctcagtaccaagaaccgttacatctacctggtgtccgagtggacagtggcatccaaccaggaagtgatattagcatttattatgatcctatgatttcaaaactaatcacatatggctctgatagaactg

SEQ ID NO: 2572 - DNA, 1400 bp, Artificial
  cDNA Sequence
ggaggaatctacttttaccatggaaggaaaggtgttacacataatattgcattacttcgagaggtgataatcaactcacgctttgtaaaaggagacatcagcactaaatttctctccgatgtgtatcctgatggcttcaaaggacacatgctaaccaagagtgagaagaaccagttattggcaatagcatcatcattgtttgtggcattccagttaagagcacaacattttcaagaaaattcaagaatgcctgttattaaaccagacatagccaactgggagctctcagtaaaattgcatgataaagttcataccgtagtagcatcaaacaatgggtcagtgttctcggtggaagttgatgggtcgaaactaaatgtgaccagcacgtggaacctggcttcgcccttattgtctgtcagcgttgatggcactcagaggactgtccagtgtctttctcgagaagcaggtggaaacatgagcattcagtttcttggtacagtgtacaaggtgaatatcttaaccagacttgccgcagaattgaacaaatttatgctggaaaaagtgactgaggacacaagcagtgttctgcgttccccgatgcccggagtggtggtggccgtctctgtcaagcctggagacgcggtagcagaaggtcaagaaatttgtgtgattgaagccatgaaaatgcagaatagtatgacagctgggaaaactggcacggtgaaatctgtgcactgtcaagctggagacacagttggagaaggggatctgctcgtggagctggaatgaaggatttataacctttcagtcatcacccaatttaattagccatttgcatgatgctttcacacacaattgattcaagcattatacaggaacacccctgtgcagctacgtttacgtcgtcatttattccacagagtcaagaccaatattctgccaaaaaatcaccaatggaaattttcattgatataaatacttgtacatatgatttgtacttctgctgtgagattccctagtgtcaaaattaaatcaataaaactgagcatttgtctaaatattagtttgccctttctttgaatgaagacaatgtacacataggcgacaggctctgccagtagactaccagcatttctttgtgatccttttaagagattgatataaatgtcagtcagttctctgccttgctttattaaattagcacttgccattttttcatctgattgccttactacttctagaagtgaggccctcactcctggtgctgattttcaaaacttcctaaggaccagagactgcaaatgcagattttggcaatccctttcctgctgtgtctctatgtgggtgtactgttggtggctgactcccctggaggtcaccctgaagcttcctggttggcc

SEQ ID NO: 2573 - DNA, 1400 bp, Artificial; identical to SEQ ID NO: 2572
  cDNA Sequence

SEQ ID NO: 2574 - DNA, 1259 bp, Artificial
  cDNA Sequence
ggaggaatctacttttaccatggaaggaaaggtgttacacataatattgcattacttcgagaggtgataatcaactcacgctttgtaaaaggagacatcagcactaaatttctctccgatgtgtatcctgatggcttcaaaggacacatgctaaccaagagtgagaagaaccagttattggcaatagcatcatcattgtttgtggcattccagttaagagcacaacattttcaagaaaattcaagaatgcctgttattaaaccagacatagccaactgggagctctcagtaaaattgcatgataaagttcataccgtagtagcatcaaacaatgggtcagtgttctcggtggaagttgatgggtcgaaactaaatgtgaccagcacgtggaacctggcttcgcccttattgtctgtcagcgttgatggcactcagaggactgtccagtgtctttctcgagaagcaggtggaaacatgagcattcagtttcttggtacagtggtagcagaaggtcaagaaatttgtgtgattgaagccatgaaaatgcagaatagtatgacagctgggaaaactggcacggtgaaatctgtgcactgtcaagctggagacacagttggagaaggggatctgctcgtggagctggaatgaaggatttataacctttcagtcatcacccaatttaattagccatttgcatgatgctttcacacacaattgattcaagcattatacaggaacacccctgtgcagctacgtttacgtcgtcatttattccacagagtcaagaccaatattctgccaaaaaatcaccaatggaaattttcattgatataaatacttgtacatatgatttgtacttctgctgtgagattccctagtgtcaaaattaaatcaataaaactgagcatttgtctaaatattagtttgccctttctttgaatgaagacaatgtacacataggcgacaggctctgccagtagactaccagcatttctttgtgatccttttaagagattgatataaatgtcagtcagttctctgccttgctttattaaattagcacttgccattttttcatctgattgccttactacttctagaagtgaggccctcactcctggtgctgattttcaaaacttcctaaggaccagagactgcaaatgcagattttggcaatccctttcctgctgtgtctctatgtgggtgtactgttggtggctgactcccctggaggtcaccctgaagcttcctggttggcc

SEQ ID NO: 2575 - DNA, 1417 bp, Artificial
  cDNA Sequence
aggcactgaagagaatggcagatgcactggataactatgttattcgaggtgttacacataatattgcattacttcgagaggtgataatcaactcacgctttgtaaaaggagacatcagcactaaatttctctccgatgtgtatcctgatggcttcaaaggacacatgctaaccaagagtgagaagaaccagttattggcaatagcatcatcattgtttgtggcattccagttaagagcacaacattttcaagaaaattcaagaatgcctgttattaaaccagacatagccaactgggagctctcagtaaaattgcatgataaagttcataccgtagtagcatcaaacaatgggtcagtgttctcggtggaagttgatgggtcgaaactaaatgtgaccagcacgtggaacctggcttcgcccttattgtctgtcagcgttgatggcactcagaggactgtccagtgtctttctcgagaagcaggtggaaacatgagcattcagtttcttggtacagtgtacaaggtgaatatcttaaccagacttgccgcagaattgaacaaatttatgctggaaaaagtgactgaggacacaagcagtgttctgcgttccccgatgcccggagtggtggtggccgtctctgtcaagcctggagacgcggtagcagaaggtcaagaaatttgtgtgattgaagccatgaaaatgcagaatagtatgacagctgggaaaactggcacggtgaaatctgtgcactgtcaagctggagacacagttggagaaggggatctgctcgtggagctggaatgaaggatttataacctttcagtcatcacccaatttaattagccatttgcatgatgctttcacacacaattgattcaagcattatacaggaacacccctgtgcagctacgtttacgtcgtcatttattccacagagtcaagaccaatattctgccaaaaaatcaccaatggaaattttcattgatataaatacttgtacatatgatttgtacttctgctgtgagattccctagtgtcaaaattaaatcaataaaactgagcatttgtctaaatattagtttgccctttctttgaatgaagacaatgtacacataggcgacaggctctgccagtagactaccagcatttctttgtgatccttttaagagattgatataaatgtcagtcagttctctgccttgctttattaaattagcacttgccattttttcatctgattgccttactacttctagaagtgaggccctcactcctggtgctgattttcaaaacttcctaaggaccagagactgcaaatgcagattttggcaatccctttcctgctgtgtctctatgtgggtgtactgttggtggctgactcccctggaggtcaccctgaagcttcctggttggcc

SEQ ID NO: 2576 - DNA, 901 bp, Artificial
  cDNA Sequence
agtacaaggtgaatatcttaaccagacttgccgcagaattgaacaaatttatgctggaaaaagtgactgaggacacaagcagtgttctgcgttccccgatgcccggagtggtggtggccgtctctgtcaagcctggagacgcggtagcagaaggtcaagaaatttgtgtgattgaagccatgaaaatgcagaatagtatgacagctgggaaaactggcacggtgaaatctgtgcactgtcaagctggagacacagttggagaaggggatctgctcgtggagctggaatgaaggatttataacctttcagtcatcacccaatttaattagccatttgcatgatgctttcacacacaattgattcaagcattatacaggaacacccctgtgcagctacgtttacgtcgtcatttattccacagagtcaagaccaatattctgccaaaaaatcaccaatggaaattttcattgatataaatacttgtacatatgatttgtacttctgctgtgagattccctagtgtcaaaattaaatcaataaaactgagcatttgtctaaatattagtttgccctttctttgaatgaagacaatgtacacataggcgacaggctctgccagtagactaccagcatttctttgtgatccttttaagagattgatataaatgtcagtcagttctctgccttgctttattaaattagcacttgccattttttcatctgattgccttactacttctagaagtgaggccctcactcctggtgctgattttcaaaacttcctaaggaccagagactgcaaatgcagattttggcaatccctttcctgctgtgtctctatgtgggtgtactgttggtggctgactcccctggaggtcaccctgaagcttcctggttggcc

SEQ ID NO: 2577 - DNA, 468 bp, Artificial
  cDNA Sequence
cctgggggacctgtggcatcatgacttctggggcagtagactgagcagcaacaccagccacaagtcctaccggcctctcaccgtcctgactttcaggattaactactacctctcgggaggcttccaccccgtgggctttcacgtggtcaacatcctcctgcacagtggcatctctgtcctcatggtggacgtcttctcggttctgtttggcggcctgcagtacaccagtaaaggccggaggctgcacctcgcccccagggcgtccctgctggccgcgctgctgtttgctgtccatcctgtgcacaccgagtgtgttgctggtgttgtcggccgtgcagacctcctgtgtgccctgttcttcttgttatctttccttggctactgtaaagcatttagagaaagtaacaaggagggagcgcattcttccaccttctgggtgctgctgagtatctttctgggagcagtggc

SEQ ID NO: 2578 - DNA, 1036 bp, Artificial
  cDNA Sequence
catgggcacgggcccgccggccttcaccgaggtggacaacccggcctcctttgctgacagcatgctggtgagggccgtaaactacaattactactattcattgaatgcctggctgctgctgtgtccctggtggctgtgttttgattggtcaatgggctgcatccccctcattaagtccatcagcgactggagggtaattgcacttgcagcactctggttctgcctaattggcctgatatgccaagccctgtgctctgaagacggccacaagagaaggatccttactctgggcctgggatttctcgttatcccatttctccccgcgagtaacctgttcttccgagtgggcttcgtggtcgcagagcgtgtcctctacctccccagcgttgggtactgtgtgctgctgacttttggattcggagccctgagcaaacataccaagaaaaagaaactcattgccgctgtcgtgctgggaatcttattcatcaacacgctgagatgtgtgctgcgcagcggcgagtggcggagtgaggaacagcttttcagaagtgctctgtctgtgtgtcccctcaatgctaaggttcactacaacattggcaaaaacctggctgataaaggcaaccagacagctgccatcagatactaccgggaagctgtaagattaaatcccaagtatgttcatgccatgaataatcttggaaatatcttaaaagaaaggaatgagctacaggaagctgaggagctgctgtctttggctgttcaaatacagccagactttgccgctgcgtggatgaatctaggcatagtgcagaatagcctgaaacggtttgaagcagcagagcaaagttaccggacagcaattaaacacagaaggaaatacccagactgttactacaacctcgggcgtctggtaagcgcggggtgccctgtgcctgtggaaggaaagatgggttatttttcttatttataataaaatgacatagtgacacccacctagcccatacattttataaagttctttcacatgtttctatct

SEQ ID NO: 2579 - DNA, 773 bp, Artificial
  cDNA Sequence
catgggcacgggcccgccggccttcaccgaggtggacaacccggcctcctttgctgacagcatgctggtgagggccgtaaactacaattactactattcattgaatgcctggctgctgctgtgtccctggtggctgtgttttgattggtcaatgggctgcatccccctcattaagtccatcagcgactggagggtaattgcacttgcagcactctggttctgcctaattggcctgatatgccaagccctgtgctctgaagacggccacaagagaaggatccttactctgggcctgggatttctcgttatcccatttctccccgcgagtaacctgttcttccgagtgggcttcgtggtcgcagagcgtgtcctctacctccccagcgttgggtactgtgtgctgctgacttttggattcggagccctgagcaaacataccaagaaaaagaaactcattgccgctgtcgtgctgggaatcttattcatcaacacgctgagatgtgtgctgcgcagcggcgagtggcggagtgaggaacagcttttcagaagtgctctgtctgtgtgtcccctcaatgctaaggttcactacaacattggcaaaaacctggctgataaaggcaaccagacagctgccatcagatactaccgggaagctgtaagattaaatcccaagtatgttcatgccatgaataatcttggaaatatcttaaaagaaaggaatgagctacaggaagctgaggagctgctgtctttggctgttcaaatacagtaag

SEQ ID NO: 2580 - DNA, 880 bp, Artificial
  cDNA Sequence
gcacttgcagcactctggttctgcctaattggcctgatatgccaagccctgtgctctgaagacggccacaagagaaggatccttactctgggcctgggatttctcgttatcccatttctccccgcgagtaacctgttcttccgagtgggcttcgtggtcgcagagcgtgtcctctacctccccagcgttgggtactgtgtgctgctgacttttggattcggagccctgagcaaacataccaagaaaaaggtatcaactgagagtggtgccagctgatgaacagaatgaccggatgcatctcactggtgacaattaccatgtctttctgttcttaagaaactcattgccgctgtcgtgctgggaatcttattcatcaacacgctgagatgtgtgctgcgcagcggcgagtggcggagtgaggaacagcttttcagaagtgctctgtctgtgtgtcccctcaatgctaaggttcactacaacattggcaaaaacctggctgataaaggcaaccagacagctgccatcagatactaccgggaagctgtaagattaaatcccaagtatgttcatgccatgaataatcttggaaatatcttaaaagaaaggaatgagctacaggaagctgaggagctgctgtctttggctgttcaaatacagccagactttgccgctgcgtggatgaatctaggcatagtgcagaatagcctgaaacggtttgaagcagcagagcaaagttaccggacagcaattaaacacagaaggaaatacccagactgttactacaacctcgggcgtctggtaagcgcggggtgccctgtgcctgtggaaggaaagatgggttatttttcttatttataataaaatgacatagtgacaccca

SEQ ID NO: 2581 - DNA, 965 bp, Artificial
  cDNA Sequence
caggactgaaaactggatatttggtccccatggactttctggtcaccctgtgaagtggacttaactttttcttgaatcatgtggaaggattctgaagtcaaaagtttttaagactctcaggcttactgtggatctggattctaaggcaacacttccttgaagaaacaagcttacagtctgtggcccagacccaggcaagtggtaaatatttaccttcacgctggagccaagatcgctgcggggagtcccgtgaagcaccactgccctctaagaccttggaaggggaaacaccagaaggtgtgggtgctgagctccgctgcgtcagactgccaggacctgagtggaactcagtgctgaaacctgggttctcactgcagctggatagcagctctgcccggatggccctagtcttcgtgtacggcaccctgaagcggggtcagcccaaccacagggtcctgcgggacggcgcccacggctccgcagcctttcgggcgcgcggccgcacgctggagccctacccgttggtgatcgcgggggagcacaacatcccgtggctgctgcacctgcccggctcggggcgcctcgtggagggcgaggtctacgcggtagacgagcggatgctgcgctttctggatgacttcgagagttgcccggccctgtaccagcgcacggtgctgcgggtacagctgctggaggaccgggccccgggcgcagaggagccgccagcgcccaccgcggtgcagtgcttcgtgtacagcagggccaccttcccgccggagtgggcccagctcccgcaccatgacagctacgactccgaggggccgcacgggctgcgctacaacccccgggagaacagataagggggacgggcagggtgggcctaggtttgagagccctggggctccaagatgcgcccagcccatgctgggtgaaggcggaagccgaacagggccctttccaatgaa

SEQ ID NO: 2582 - DNA, 291 bp, Artificial
  cDNA Sequence
caggactgaaaactggatatttggtccccatggactttctggtcaccctgtgaagtggacttaactttttcttgaatcatgtggaaggattctgaagtcaaaagtttttaagactctcaggcttactgtggatctggattctaaggcaacacttccttgaagaaacaagcttacagctctgcccggatggccctagtcttcgtgtacggcaccctgaagcggggtcagcccaaccacagggtcctgcgggacggcgcccacggctccgcagcctttcgggcgcgcggccgc

SEQ ID NO: 2583 - DNA, 458 bp, Artificial
  cDNA Sequence
gtgtgggtgctgagctccgctgcgtcagactgccaggacctgagtggaactcagtgctgaaacctgggttctcactgcagctggatagcaggtggttacaaaattatatgtatttttagggttatttctaatttttctttaatagttattggcaattttcaaagtcctttaagaaacactgaaaactgctcaagaaaatggcagttctgcagggctcaggtagcagggcaggctgttgggacaggtttgacagactgtcctaatacaaggagcgccttttcccagatcagcagctctagagggtggcggccttgcctggaacctccgcaacctccgcgcccaccacacaagggctgagaacagtaagctctgcccggatggccctagtcttcgtgtacggcaccctgaagcggggtcagcccaaccacagggtcctgcgggacggcgcccacggctcc

SEQ ID NO: 2584 - DNA, 506 bp, Artificial
  cDNA Sequence
gagacagaagtgtcactctctccatagctgtaccattcctaccacctggcccccaagtggcattgctttaacccattgtctctagggaaaatgttctctttcgattttggttctcagtcctataatttctggggcttaaattagtcctggagctagggaagaggtgatgtcatccttccattgtctccttcggccacagtttcattttaagagtattggactgaaaactggatatttggtccccatggactttctggtcaccctgtgaagtggacttaactttttcttgaatcatgtggaaggattctgaagtcaaaagtttttaagactctcaggcttactgtggatctggattctaaggcaacacttccttgaagaaacaagcttacagctctgcccggatggccctagtcttcgtgtacggcaccctgaagcggggtcagcccaaccacagggtcctgcgggacggcgcccacggctccgcagcctttcgggcgcgcggccgc

SEQ ID NO: 2585 - DNA, 425 bp, Artificial
  cDNA Sequence
gtcgaaaattgctgtctttaagatgaagcacccagaggaccacaatcctcggattttatgagaagaccttctgccctgcctgcccttttgagacctttatctgaaaaggaacctgcaatcctagaaaagaggtggaggcaggcttgattcagttaaggaagttctttcttctcagcaattaccacgccaattctgtggaaaagcaacatttggaagacgagagaaatccactgtaggaagtattagaaatacctgcaattaggcttcaaacaagcaaatgaggcaggaaaagtaaatgacgacagcctgtgtcctctccatgacaccactctgcctccatggaaccactctgcccccatggatctctccagttttaagtctggggaaatctatcaatcacacaatttcagttagcattccaagaa

SEQ ID NO: 2586 - DNA, 2167 bp, Artificial
  cDNA Sequence
gcggccgctgcccgctttgcgccgctcctccctgcgcgagtagcgctggccccggcgtcgaggcggccatggcgacccggagcccgctccccacccaccccgcctgctccgccctcccctccgccccgcgccacctttgatggctcggacctcagccggccaccgccagccctgctcgcgcgcccgcgccgccgccgcccgcgggtattaatagccggcgccgccgcgccctcggccgccgggggcttgggagccgccgatcccggagcccgagccgggagagggagccgccgcagccgccggcgctgtggagatattctctaagccgctttcatcatgggagaaatagagcagaggccgaccccaggatcacgactgggggccccggaaaattcggggatcagtaccttggaacgtggacagaagccgcccccaacaccttcaggaaaactcgtgtccatcaaaatccagatgctggatgacacccaggaggcatttgaagttccacaaagagctcctgggaaggtgctgctggatgcagtttgcaaccacctcaacctcgtggaaggtgactattttggcctcgagtttcctgatcacaaaaagatcacggtgtggctggatctcctaaaacccattgtgaaacagattagaaggccaaagcacgttgttgttaagtttgtggtgaaattctttccgcctgaccacacacaactccaagaagaactcacaaggtacctgttcgcgctgcaggtgaagcaggacttggctcaaggcaggttgacgtgtaatgacaccagcgcagctctcttgatttcacacattgtgcaatctgagattggggattttgatgaagccttggacagagagcacttagcaaaaaataaatacatacctcagcaagacgcactagaggacaaaatcgtggaatttcaccataaccacattggacaaacaccagcagaatcagatttccagctcctagagattgcccgtcggctagagatgtatggaatccggttgcacccggccaaggacagggaaggcacgaagatcaatctggccgttgccaacacgggaattctagtgtttcagggtttcactaagatcaatgccttcaactgggccaaggtgcggaagctgagcttcaagaggaagcgctttctcatcaagctccggccagatgccaatagtgcgtaccaggataccttggaattcctgatggccagtcgggatttctgcaagtccttctggaaaatctgtgttgaacatcatgccttctttagactttttgaagagcccaaaccaaagcccaagcccgtcctctttagccgggggtcatcatttcggttcagtggtcggactcagaagcaggttctcgactatgttaaagaaggaggacataagaaggtgcagtttgaaaggaagcacagcaagattcattctatccggagccttgcttcacagcctacagaactgaattcggaagtgctggagcagtctcagcagagcaccagccttacatttggagaaggtgccgaatctccagggggccagagctgccggcgaggaaaggaaccgaaggtttccgccggggagccggggtcgcacccgagccctgcgccgaggagaagccccgcgggtaacaagcaggcggacggagccgcctcggcgcccacggaggaagaggaggaggtcgttaaggataggacccagcagagtaaacctcagcccccgcagccaagcacaggctccctgactggcagtcctcacctttccgagctgtctgtgaactcgcaggggggagtggcccctgccaacgtgaccttgtctcccaacctgagccccgacaccaagcaggcctctcccttgatcagcccgctgctgaatgaccaggcctgcccccggacggacgatgaggatgagggccggaggaagagattcccaactgataaagcgtacttcatagctaaggaagtgtctaccaccgagcgaacatatctgaaggatctcgaagttatcacttcgtggtttcagagcacagtgagcaaagaggacgccatgccggaagcactgaaaagtctcatattcccgaattttgaacctttgcacaaatttcatactaattttctcaaggaaattgagcaacgacttgccctgtggtgag

SEQ ID NO: 2587 - DNA, 761 bp, Artificial
  cDNA Sequence
gcggccgctgcccgctttgcgccgctcctccctgcgcgagtagcgctggccccggcgtcgaggcggccatggcgacccggagcccgctccccacccaccccgcctgctccgccctcccctccgccccgcgccacctttgatggctcggacctcagccggccaccgccagccctgctcgcgcgcccgcgccgccgccgcccgcgggtattaatagccggcgccgccgcgccctcggccgccgggggcttgggagccgccgatcccggagcccgagccgggagagggagccgccgcagccgccggcgctgtggagatattctctaagccgctttcatcatgggagaaatagagcagaggccgaccccaggatcacgactgggggccccggaaaattcggggatcagtaccttggaacgtggacagaagccgcccccaacaccttcaggaaaactcgtgtccatcaaaatccagatgctggatgacacccaggaggcatttgaagttccaatggtgtcctcatcctccttcctcaaagccaccggctcctcctggacgggttgggtactgagatgctccatgaagcccaagcaccattcacatctaattgagaagtttggagaggacagaattctcactcatcttacaggctctatttcttacacaaactgggctggaagtagaagcttagcggtcacagtcactgaagagcttcttaatcttttttgagtcaggacttgaagtcctgtttcattatttcattc

SEQ ID NO: 2588 - DNA, 1560 bp, Artificial
  cDNA Sequence
tctaggtgtggctggatctcctaaaacccattgtgaaacagattagaaggccaaagcacgttgttgttaagtttgtggtgaaattctttccgcctgaccacacacaactccaagaagaactcacaaggtacctgttcgcgctgcaggtgaagcaggacttggctcaaggcaggttgacgtgtaatgacaccagcgcagctctcttgatttcacacattgtgcaatctgagattggggattttgatgaagccttggacagagagcacttagcaaaaaataaatacatacctcagcaagacgcactagaggacaaaatcgtggaatttcaccataaccacattggacaaacaccagcagaatcagatttccagctcctagagattgcccgtcggctagagatgtatggaatccggttgcacccggccaaggacagggaaggcacgaagatcaatctggccgttgccaacacgggaattctagtgtttcagggtttcactaagatcaatgccttcaactgggccaaggtgcggaagctgagcttcaagaggaagcgctttctcatcaagctccggccagatgccaatagtgcgtaccaggataccttggaattcctgatggccagtcgggatttctgcaagtccttctggaaaatctgtgttgaacatcatgccttctttagactttttgaagagcccaaaccaaagcccaagcccgtcctctttagccgggggtcatcatttcggttcagtggtcggactcagaagcaggttctcgactatgttaaagaaggaggacataagaaggtgcagtttgaaaggaagcacagcaagattcattctatccggagccttgcttcacagcctacagaactgaattcggaagtgctggagcagtctcagcagagcaccagccttacatttggagaaggtgccgaatctccagggggccagagctgccggcgaggaaaggaaccgaaggtttccgccggggagccggggtcgcacccgagccctgcgccgaggagaagccccgcgggtaacaagcaggcggacggagccgcctcggcgcccacggaggaagaggaggaggtcgttaaggataggacccagcagagtaaacctcagcccccgcagccaagcacaggctccctgactggcagtcctcacctttccgagctgtctgtgaactcgcaggggggagtggcccctgccaacgtgaccttgtctcccaacctgagccccgacaccaagcaggcctctcccttgatcagcccgctgctgaatgaccaggcctgcccccggacggacgatgaggatgagggccggaggaagagattcccaactgataaagcgtacttcatagctaaggaagtgtctaccaccgagcgaacatatctgaaggatctcgaagttatcacttcgtggtttcagagcacagtgagcaaagaggacgccatgccggaagcactgaaaagtctcatattcccgaattttgaacctttgcacaaatttcatactaattttctcaaggaaattgagcaacgacttgccctgtggtgag

SEQ ID NO: 2589 - DNA, 997 bp, Artificial
  cDNA Sequence
ccctgcaggagttcatccgtctgggcagcctcagcaagctctcggggaaggggctccagcagcgcatgttcttcctgttcaacgacgtcctgctatacacgagccgggggctgacggcctccaatcagtttaaagtccacgggcagctcccgctctatggcatgacgattgaggagagcgaagacgagtggggggtgccccactgcctgaccctccggggccagcggcagtccatcatcgtggccgccagttctcggtccgagatggagaagtgggttgaggacatccagatggccattgacctggcggagaagagcagcagccccgcccctgagttcctggccagcagcccccctgacaacaagtcccctgatgaagccaccgcggctgaccaggagtcagaggatgacctgagcgcctcgcgcacatcgctggagcgccaggccccgcaccgcggcaacacaatggtgcacgtgtgctggcaccgcaacaccagcgtctccatggtggacttcagcatcgcagtggagaatcagttgtctggaaacctgctgaggaaattcaaaaacagcaacgggtggcagaagctgtgggtggtgttcacaaacttctgcctgttcttctacaaatcacaccaggacaatcatccccttgccagcctgcctctgctcggctactcgctcaccatcccctctgagtccgagaacatccagaaagactacgtgttcaagctgcacttcaagtcccacgtctactacttcagggcggaaagcgagtacacgttcgaaaggtggatggaagtgatccgcagtgccaccagctctgcctcgcgaccccacgtgttgagtcacaaagagtctcttgtgtattgatggccggacacactcgtttccgcagtggctgctttcctggaagacgtttcctttcttctgtattaatgaagcctggtaaaattaacacctgtctgaaaatcaaaaacatggcttcccagcagctc

SEQ ID NO: 2590 - DNA, 2164 bp, Artificial
  cDNA Sequence
ccggctccagcggccagcgcgcgcgggcccaggccgcccggctccagcccagcagtagcggcagcagcggcggcggcggcagtgcgcgcgaggccctgcgcccccagcagctcctccctggcgccgtgcatggagacgcggcccgccacccgccgctgagcccccgccgcccggccgggacccgccagggctggggtggcctcgggctccggccggccccgccgcccgagggctgcgcgcggcccgcgggcctcgccgccccgcgcggatcgtcgcggcccggccgtcccgtcccaggaagtggccgtcctgagcgccatggctcactccccggtgcagtcgggcctgcccggcatgcagaacctaaaggcagacccagaagagctttttacaaaactagagaaaattgggaagggctcctttggagaggtgttcaaaggcattgacaatcggactcagaaagtggttgccataaagatcattgatctggaagaagctgaagatgagatagaggacattcaacaagaaatcacagtgctgagtcagtgtgacagtccatatgtaaccaaatattatggatcctatctgaaggatacaaaattatggataataatggaatatcttggtggaggctccgcactagatctattagaacctggcccattagatgaaacccagatcgctactatattaagagaaatactgaaaggactcgattatctccattcggagaagaaaatccacagagacattaaagcggccaacgtcctgctgtctgagcatggcgaggtgaagctggcggactttggcgtggctggccagctgacagacacccagatcaaaaggaacaccttcgtgggcaccccattctggatggcacccgaggtcatcaaacagtcggcctatgactcgaaggcagacatctggtccctgggcataacagctattgaacttgcaagaggggaaccacctcattccgagctgcaccccatgaaagttttattcctcattccaaagaacaacccaccgacgttggaaggaaactacagtaaacccctcaaggagtttgtggaggcctgtttgaataaggagccgagctttagacccactgctaaggagttattgaagcacaagtttatactacgcaatgcaaagaaaacttcctacttgaccgagctcatcgacaggtacaagagatggaaggccgagcagagccatgacgactcgagctccgaggattccgacgcggaaacagatggccaagcctcggggggcagtgattctggggactggatcttcacaatccgagaaaaagatcccaagaatctcgagaatggagctcttcagccatcggacttggacagaaataagatgaaagacatcccgaagaggcctttctctcagtgtttatctacaattatttctcctctgtttgcagagttgaaggagaagagccaggcgtgcggagggaacttggggtccattgaagagctgcgaggggccatctacctagcggaggaggcgtgccctggcatctccgacaccatggtggcccagctcgtgcagcggctccagagatactctctaagtggtggaggaacttcatcccactgaaattcctttggcatttggggttttgtttttccttttttccttcttcatcctcctccttttttaaaagtcaacgagagccttcgctgactccaccgaagaggtgcgccactgggagccaccccagcgccaggcgcccgtccagggacacacacagtcttcactgtgctgcagccagatgaagtctctcagatgggtggggagggtcagctccttccagcgatcattttattttattttattacttttgtttttaattttaaccatagtgcacatattccaggaaagtgtctttaaaaacaaaaacaaaccctgaaatgtatatttgggattatgataaggcaactaaagacatgaaacctcaggtatcctgctttaagttgataactccctctgggagctggagaatcgctctggtggatgggtgtacagatttgtatataatgtcatttttacggaaaccctttcggcgtgcataaggaatcactgtgtacaaactggccaagtgcttctgtagataacgtcagtggagtaaatattcgacaggccataa

SEQ ID NO: 2591 - DNA, 2107 bp, Artificial
  cDNA Sequence
ccggctccagcggccagcgcgcgcgggcccaggccgcccggctccagcccagcagtagcggcagcagcggcggcggcggcagtgcgcgcgaggccctgcgcccccagcagctcctccctggcgccgtgcatggagacgcggcccgccacccgccgctgagcccccgccgcccggccgggacccgccagggctggggtggcctcgggctccggccggccccgccgcccgagggctgcgcgcggcccgcgggcctcgccgccccgcgcggatcgtcgcggcccggccgtcccgtcccaggaagtggccgtcctgagcgccatggctcactccccggtgcagtcgggcctgcccggcatgcagaacctaaaggcagacccagaagagctttttacaaaactagagaaaattgggaagggctcctttggagaggtgttcaaaggcattgacaatcggactcagaaagtggttgccataaagatcattgatctggaagaagctgaagatgagatagaggacattcaacaagaaatcacagtgctgagtcagtgtgacagtccatatgtaaccaaatattatggatcctatctgaagttagaacctggcccattagatgaaacccagatcgctactatattaagagaaatactgaaaggactcgattatctccattcggagaagaaaatccacagagacattaaagcggccaacgtcctgctgtctgagcatggcgaggtgaagctggcggactttggcgtggctggccagctgacagacacccagatcaaaaggaacaccttcgtgggcaccccattctggatggcacccgaggtcatcaaacagtcggcctatgactcgaaggcagacatctggtccctgggcataacagctattgaacttgcaagaggggaaccacctcattccgagctgcaccccatgaaagttttattcctcattccaaagaacaacccaccgacgttggaaggaaactacagtaaacccctcaaggagtttgtggaggcctgtttgaataaggagccgagctttagacccactgctaaggagttattgaagcacaagtttatactacgcaatgcaaagaaaacttcctacttgaccgagctcatcgacaggtacaagagatggaaggccgagcagagccatgacgactcgagctccgaggattccgacgcggaaacagatggccaagcctcggggggcagtgattctggggactggatcttcacaatccgagaaaaagatcccaagaatctcgagaatggagctcttcagccatcggacttggacagaaataagatgaaagacatcccgaagaggcctttctctcagtgtttatctacaattatttctcctctgtttgcagagttgaaggagaagagccaggcgtgcggagggaacttggggtccattgaagagctgcgaggggccatctacctagcggaggaggcgtgccctggcatctccgacaccatggtggcccagctcgtgcagcggctccagagatactctctaagtggtggaggaacttcatcccactgaaattcctttggcatttggggttttgtttttccttttttccttcttcatcctcctccttttttaaaagtcaacgagagccttcgctgactccaccgaagaggtgcgccactgggagccaccccagcgccaggcgcccgtccagggacacacacagtcttcactgtgctgcagccagatgaagtctctcagatgggtggggagggtcagctccttccagcgatcattttattttattttattacttttgtttttaattttaaccatagtgcacatattccaggaaagtgtctttaaaaacaaaaacaaaccctgaaatgtatatttgggattatgataaggcaactaaagacatgaaacctcaggtatcctgctttaagttgataactccctctgggagctggagaatcgctctggtggatgggtgtacagatttgtatataatgtcatttttacggaaaccctttcggcgtgcataaggaatcactgtgtacaaactggccaagtgcttctgtagataacgtcagtggagtaaatattcgacaggccataa

SEQ ID NO: 2592 - DNA, 656 bp, Artificial; identical to SEQ ID NO: 1087
  cDNA Sequence

SEQ ID NO: 2593 - DNA, 1413 bp, Artificial
  cDNA Sequence
ttgcagcggccaacgtcctgctgtctgagcatggcgaggtgaagctggcggactttggcgtggctggccagctgacagacacccagatcaaaaggaacaccttcgtgggcaccccattctggatggcacccgaggtcatcaaacagtcggcctatgactcgaaggcagacatctggtccctgggcataacagctattgaacttgcaagaggggaaccacctcattccgagctgcaccccatgaaagttttattcctcattccaaagaacaacccaccgacgttggaaggaaactacagtaaacccctcaaggagtttgtggaggcctgtttgaataaggagccgagctttagacccactgctaaggagttattgaagcacaagtttatactacgcaatgcaaagaaaacttcctacttgaccgagctcatcgacaggtacaagagatggaaggccgagcagagccatgacgactcgagctccgaggattccgacgcggaaacagatggccaagcctcggggggcagtgattctggggactggatcttcacaatccgagaaaaagatcccaagaatctcgagaatggagctcttcagccatcggacttggacagaaataagatgaaagacatcccgaagaggcctttctctcagtgtttatctacaattatttctcctctgtttgcagagttgaaggagaagagccaggcgtgcggagggaacttggggtccattgaagagctgcgaggggccatctacctagcggaggaggcgtgccctggcatctccgacaccatggtggcccagctcgtgcagcggctccagagatactctctaagtggtggaggaacttcatcccactgaaattcctttggcatttggggttttgtttttccttttttccttcttcatcctcctccttttttaaaagtcaacgagagccttcgctgactccaccgaagaggtgcgccactgggagccaccccagcgccaggcgcccgtccagggacacacacagtcttcactgtgctgcagccagatgaagtctctcagatgggtggggagggtcagctccttccagcgatcattttattttattttattacttttgtttttaattttaaccatagtgcacatattccaggaaagtgtctttaaaaacaaaaacaaaccctgaaatgtatatttgggattatgataaggcaactaaagacatgaaacctcaggtatcctgctttaagttgataactccctctgggagctggagaatcgctctggtggatgggtgtacagatttgtatataatgtcatttttacggaaaccctttcggcgtgcataaggaatcactgtgtacaaactggccaagtgcttctgtagataacgtcagtggagtaaatattcgacaggccataa

SEQ ID NO: 2594 - DNA, 622 bp, Artificial
  cDNA Sequence
ttgcagcggccaacgtcctgctgtctgagcatggcgaggtgaagctggcggactttggcgtggctggccagctgacagacacccagatcaaaaggaacaccttcgtgggcaccccattctggatggcacccgaggtcatcaaacagtcggcctatgactcgaaggcagacatctggtccctgggcataacagctattgaacttgcaagaggggaaccacctcattccgagctgcaccccatgaaagttttattcctcattccaaagaacaacccaccgacgttggaaggaaactacagtaaacccctcaaggagtttgtggaggcctgtttgaataaggagccgagctttagacccactgctaaggagttattgaagcacaagtttatactacgcaatgcaaagaaaacttcctacttgaccgagctcatcgacaggtacaagagatggaaggccgagcagagccatgacgactcgagctccgaggattccgacgcggaaacagatggccaagcctcggggggcagtgattctggggactggatcttcacaatccgagaaaaagatcccaagaatctcgagaatggagctcttcagccatcggacttggacagaaataaggt

SEQ ID NO: 2595 - DNA, 863 bp, Artificial
  cDNA Sequence
cgtggctggccagctgacagacacccagatcaaaaggaacaccttcccatcggacttggacagaaataagatgaaagacatcccgaagaggcctttctctcagtgtttatctacaattatttctcctctgtttgcagagttgaaggagaagagccaggcgtgcggagggaacttggggtccattgaagagctgcgaggggccatctacctagcggaggaggcgtgccctggcatctccgacaccatggtggcccagctcgtgcagcggctccagagatactctctaagtggtggaggaacttcatcccactgaaattcctttggcatttggggttttgtttttccttttttccttcttcatcctcctccttttttaaaagtcaacgagagccttcgctgactccaccgaagaggtgcgccactgggagccaccccagcgccaggcgcccgtccagggacacacacagtcttcactgtgctgcagccagatgaagtctctcagatgggtggggagggtcagctccttccagcgatcattttattttattttattacttttgtttttaattttaaccatagtgcacatattccaggaaagtgtctttaaaaacaaaaacaaaccctgaaatgtatatttgggattatgataaggcaactaaagacatgaaacctcaggtatcctgctttaagttgataactccctctgggagctggagaatcgctctggtggatgggtgtacagatttgtatataatgtcatttttacggaaaccctttcggcgtgcataaggaatcactgtgtacaaactggccaagtgcttctgtagataacgtcagtggagtaaatattcgacaggccataa

SEQ ID NO: 2596 - DNA, 1103 bp, Artificial
  cDNA Sequence
caggccataaactgttacactgtttttaataatggcaaagagacccactgctaaggagttattgaagcacaagtttatactacgcaatgcaaagaaaacttcctacttgaccgagctcatcgacaggtacaagagatggaaggccgagcagagccatgacgactcgagctccgaggattccgacgcggaaacagatggccaagcctcggggggcagtgattctggggactggatcttcacaatccgagaaaaagatcccaagaatctcgagaatggagctcttcagccatcggacttggacagaaataagatgaaagacatcccgaagaggcctttctctcagtgtttatctacaattatttctcctctgtttgcagagttgaaggagaagagccaggcgtgcggagggaacttggggtccattgaagagctgcgaggggccatctacctagcggaggaggcgtgccctggcatctccgacaccatggtggcccagctcgtgcagcggctccagagatactctctaagtggtggaggaacttcatcccactgaaattcctttggcatttggggttttgtttttccttttttccttcttcatcctcctccttttttaaaagtcaacgagagccttcgctgactccaccgaagaggtgcgccactgggagccaccccagcgccaggcgcccgtccagggacacacacagtcttcactgtgctgcagccagatgaagtctctcagatgggtggggagggtcagctccttccagcgatcattttattttattttattacttttgtttttaattttaaccatagtgcacatattccaggaaagtgtctttaaaaacaaaaacaaaccctgaaatgtatatttgggattatgataaggcaactaaagacatgaaacctcaggtatcctgctttaagttgataactccctctgggagctggagaatcgctctggtggatgggtgtacagatttgtatataatgtcatttttacggaaaccctttcggcgtgcataaggaatcactgtgtacaaactggccaagtgcttctgtagataacgtcagtggagtaaatattcgacaggccataa

SEQ ID NO: 2597 - DNA, 796 bp, Artificial
  cDNA Sequence
aagatgaaagacatcccgaagaggcctttctctcagtgtttatctacaattatttctcctctgtttgcagagttgaaggagaagagccaggcgtgcggagggaacttggggtccattgaagagctgcgaggggccatctacctagcggaggaggcgtgccctggcatctccgacaccatggtggcccagctcgtgcagcggctccagagatactctctaagtggtggaggaacttcatcccactgaaattcctttggcatttggggttttgtttttccttttttccttcttcatcctcctccttttttaaaagtcaacgagagccttcgctgactccaccgaagaggtgcgccactgggagccaccccagcgccaggcgcccgtccagggacacacacagtcttcactgtgctgcagccagatgaagtctctcagatgggtggggagggtcagctccttccagcgatcattttattttattttattacttttgtttttaattttaaccatagtgcacatattccaggaaagtgtctttaaaaacaaaaacaaaccctgaaatgtatatttgggattatgataaggcaactaaagacatgaaacctcaggtatcctgctttaagttgataactccctctgggagctggagaatcgctctggtggatgggtgtacagatttgtatataatgtcatttttacggaaaccctttcggcgtgcataaggaatcactgtgtacaaactggccaagtgcttctgtagataacgtcagtggagtaaatattcgacaggccataa

SEQ ID NO: 2598 - DNA, 366 bp, Artificial
  cDNA Sequence
ccaaggcattccaatgaagcgcagacatggggcgggagcgtggagaggatctgtaagtatatcaagaggctcccgtcagttccagaatagccatatgtacgtgctatgaagcttagattttatcccaaagatgaaggaaaaccactgaagaataacacacttagctatgcataagcaaacctataccatccctcctcagtctttattgtgctacttactaattgaatgtcagtcctcccccagcgaccctaagctccatgagaacagggactgcatgggttttgttcacccatgtattcctatcatcaaaagaagtgtgtggccagatgctgtggctcatgcctgtaatcccagcactttgggagg

SEQ ID NO: 2599 - DNA, 630 bp, Artificial
  cDNA Sequence
gacgaaaaccatgaagtgggaagcgaggaagaggaaataccattcaggtgtttcatatgtcgccaggccttccaaaacccagtcgtcaccaagtgcaggcattatttctgcgagagctgcgcgctggagcacttccgggccaccccgcgctgctacatctgtgaccagccaaccggcggcatctttaaccccgccaaagaactgatggcgaaactgcaaaagcttcaggctgcagaaggaaaaaagagataagaaagactcaagtctgtatgtacactggggagaagcagcctgttgagtaagatgagagagatgacagtcttcctgcaatcccatgcctgagtatgtaaccaaaagaattgaaatccggatctcaaagaggtatgtgcactcccatgttcactgcagaattatttgcaaaagccaagaggtgtaaacaacccaagtgtccatggatggatgaatggacaaacaaaatgcgatacacacacacaatggaatgctattaagccttaacgggaaggaaatccttttaaagatttaaactgatccttttaaggatcacatgctacaactagaatgaaccttgaagacgacactgctaagtgaaataaactagtcacaaaatga

SEQ ID NO: 2600 - DNA, 2213 bp, Artificial
  cDNA Sequence
gagtgcgcctgcgcggtcgctggggctcgcacttcagcttcccctcccccggcgccctctggggctccgagcccggcgggaccatgttcaccagcaccggctccagtgggctctacaaggcgcctctgtcgaagagccttctgctggtccccagtgccctctccctcctgctcgccctcctcctgcctcactgccagaagctctttgtgtatgaccttcacgcagtcaagaacgacttccagatttggaggttgatatgtggaagaataatttgccttgatttgaaagatactttctgcagtagtctgcttatttataattttaggatatttgaaagaagatatggaagcagaaaatttgcatcctttttgctgggttcctgggttttgtcagccttatttgactttctcctcattgaagctatgcagtatttctttggcatcactgcagctagtaatttgccttctggattcctggcacctgtgtttgctctgtttgtaccattttactgctccataccaagagtccaagtggcacaaattctgggtccgttgtccatcacaaacaagacattgatttatatattgggactgcagcttttcacctctggttcctacatctggattgtagccataagtggacttatgtccggtctgtgctacgacagcaaaatgttccaggtgcatcaggtgctctgcatccccagctggatggcaaaattcttttcttggacacttgaacccatcttctcttcttcagaacccaccagcgaagccagaattgggatgggagccacgctggacatccagagacagcagagaatggagctgctggaccggcagctgatgttctctcagtttgcacaagggaggcgacagagacagcagcaggtaaaagaatgatcaattggaatcgtctttttcctcctttacgtcagcgacaaaacgtaaactatcagggcggtcggcagtctgagccagcagcgccccctctagaagtttctgaggaacaggtcgcccggctcatggagatgggattttccagaggtgatgctttggaagccctgagagcttcaaacaatgacctcaatgtcgccaccaacttcctgctgcagcactgatagtcccaggccaacactgggaccggaccggcagccgagtgacagtgcgtggtccccaccatcagatcagcccggggaccgagcatctctggtgctgatgttcttgtgggaagagggaggttccaccgcacccctgccctcaaccgcaagactgttgccgttttagtgtggagataagtttgccattacattagcatgtattttctatctatattttttattgggcattttccctaggttggagagtcagcactcgttttgaatgtgtttaaaatgcattaaaatggaagatttctgcaggcagttgaatggcactccagatggggaattgctgtaaccctcttactgtaacatgtcatctcctgcgtcgtgatggggagagggtaatgttacttcacaaaggacatgtcagatccttcttcatggacttttttagttactgttttttctctcaaacttgttttcgaatctcctgggagtgagggagaaacagggagctgaatcctcccccaagctgttccaggccagaggactctgcagtaccttctcctacatctagtaacaaagaatggtgataaccatgcactggttcaaggttctggagttctccatgaaacttgggttaattttgctcagagtatccagagttagccactaggctgcgggtgaaatgggatggagaagaacaacagcaggcttcctggagccacatgggctgactagggcactctgtggctggcctggcatgggctcagcccaggaagaggagaaacgatcccttgcctgcccctccctgtggcagggctaactgcctggccctcctggctcgcagccagccagccccctggcagcaggttctcctcagggcttgggtcttcaacctgtggcgacaggaggcagggcagactgtggaggacaggatgcaggtcagggagagggaaggcaggggtggaccgccatgagcatgaaaagacccgaagcaagttgactcttgcaatgtgcaactgttatgttctgcaaaatgagcaacgatgtatcaaattgatgcaaatttagatgttgatacttacaataaagtttttaatgtgtttta

SEQ ID NO: 2601 - DNA, 1152 bp, Artificial
  cDNA Sequence
gagtgcgcctgcgcggtcgctggggctcgcacttcagcttcccctcccccggcgccctctggggctccgagcccggcgggaccatgttcaccagcaccggctccagtgggctctacaaggcgcctctgtcgaagagccttctgctggtccccagtgccctctccctcctgctcgccctcctcctgcctcactgccagaagctctttgtgtatgaccttcacgcagtcaagaacgacttccagatttggaggttgatatgtggaagaataatttgccttgatttgaaagatactttctgcagtagtctgcttatttataattttaggatatttgaaagaagatatggaagcagaaaatttgcatcctttttgctgggttcctgggttttgtcagccttatttgactttctcctcattgaagctatgcagtatttctttggcatcactgcagctagtaatttgccttctggattcctggcacctgtgtttgctctgtttgtaccattttactgctccataccaagagtccaagtggcacaaattctgggtccgttgtccatcacaaacaagacattgatttatatattgggactgcagcttttcacctctggttcctacatctggattgtagccataagtggacttatgtccggtctgtgctacgacagcaaaatgttccaggtgcatcaggtgctctgcatccccagctggatggcaaaattcttttcttggacacttgaacccatcttctcttcttcagaacccaccagcgaagccagaattgggatgggagccacgctggacatccagagacagcagagaatggagctgctggaccggcagctgatgttctctcagtttgcacaagggaggcgacagagacagcagcaggtaaaagaatgatcaattggaatcgtctttttcctcctttacgtcagcgacaaaacgtaaactatcagggcggtcggcagtctgagccagcagcgccccctctagaagtttctgaggaacaggtaattaatcagtaatacctggtactcattctaaatccatgtttcagagttgaagcagtttcgatcaacaggactcaaaagtaatcaagcgtgtaaatacaaagatggtgacagcagtccatctgccaccatgatagaga

SEQ ID NO: 2602 - DNA, 570 bp, Artificial
  cDNA Sequence
gcacttcagcttcccctcccccggcgccctctggggctccgagcccggcgggaccatgttcaccagcaccggctccagtgggctctacaaggcgcctctgtcgaagagccttctgctggtccccagtgccctctccctcctgctcgccctcctcctgcctcactgccagaagctctttgtgtatgaccttcacgcagtcaagaacgacttccagatttggaggttgatatgtggaagaataatttgccttgatttgaaagatactttctgcagtagtctgcttatttataattttaggatatttgaaagaagatatggaagcagaaaatttgcatcctttttgctgggttcctgggttttgtcagccttatttgactttctcctcattgaagctatgcagtatttctttggcatcactgcagctagtaatttgccttctggattcctggcacctgtgtttgctctgtttgtaccattttactgctccataccaagagtccaagtggcacaaattctgggtccgttgtccatcacaaacaagacattgatttatatattgggactgcaggt

SEQ ID NO: 2603 - DNA, 1037 bp, Artificial
  cDNA Sequence
atgttcaccagcaccggctccagtgggctctacaaggcgcctctgtcgaagagccttctgctggtccccagtgccctctccctcctgctcgccctcctcctgcctcactgccagaagctctttgtgtatgaccttcacgcagtcaagaacgacttccagatttggaggttgatatgtggaagaataatttgccttgatttgaaagatactttctgcagtagtctgcttatttataattttaggatatttgaaagaagatatggaagcagaaaatttgcatcctttttgctgggttcctgggttttgtcagccttatttgactttctcctcattgaagctatgcagtatttctttggcatcactgcagctagtaatttgccttctggattatgtcattaggttcttctaacgtctaaagtgctgtgagtatggaggaacattgtcagacacaagaaagagcatcaagcaagtcagctgaattctttgggccgccacctcactgtgtataaaataaagcctggcacctgtgtttgctctgtttgtaccattttactgctccataccaagagtccaagtggcacaaattctgggtccgttgtccatcacaaacaagacattgatttatatattgggactgcagcttttcacctctggttcctacatctggattgtagccataagtggacttatgtccggtctgtgctacgacagcaaaatgttccaggtgcatcaggtgctctgcatccccagctggatggcaaaattcttttcttggacacttgaacccatcttctcttcttcagaacccaccagcgaagccagaattgggatgggagccacgctggacatccagagacagcagagaatggagctgctggaccggcagctgatgttctctcagtttgcacaagggaggcgacagagacagcagcaggtaaaagaatgatcaattggaatcgtctttttcctcctttacgtcagcgacaaaacgtaaactatcagggcggtcggcagtctgagccagcagcgccccctct

SEQ ID NO: 2604 - DNA, 1892 bp, Artificial
  cDNA Sequence
cagcaccggctccagtgggctctacaaggcgcctctgtcgaagagccttctgctggtccccagtgccctctccctcctgctcgccctcctcctgcctcactgccagaagctctttgtgtatgaccttcacgcagtcaagaacgacttccagcctggcacctgtgtttgctctgtttgtaccattttactgctccataccaagagtccaagtggcacaaattctgggtccgttgtccatcacaaacaagacattgatttatatattgggactgcagcttttcacctctggttcctacatctggattgtagccataagtggacttatgtccggtctgtgctacgacagcaaaatgttccaggtgcatcaggtgctctgcatccccagctggatggcaaaattcttttcttggacacttgaacccatcttctcttcttcagaacccaccagcgaagccagaattgggatgggagccacgctggacatccagagacagcagagaatggagctgctggaccggcagctgatgttctctcagtttgcacaagggaggcgacagagacagcagcaggtaaaagaatgatcaattggaatcgtctttttcctcctttacgtcagcgacaaaacgtaaactatcagggcggtcggcagtctgagccagcagcgccccctctagaagtttctgaggaacaggtcgcccggctcatggagatgggattttccagaggtgatgctttggaagccctgagagcttcaaacaatgacctcaatgtcgccaccaacttcctgctgcagcactgatagtcccaggccaacactgggaccggaccggcagccgagtgacagtgcgtggtccccaccatcagatcagcccggggaccgagcatctctggtgctgatgttcttgtgggaagagggaggttccaccgcacccctgccctcaaccgcaagactgttgccgttttagtgtggagataagtttgccattacattagcatgtattttctatctatattttttattgggcattttccctaggttggagagtcagcactcgttttgaatgtgtttaaaatgcattaaaatggaagatttctgcaggcagttgaatggcactccagatggggaattgctgtaaccctcttactgtaacatgtcatctcctgcgtcgtgatggggagagggtaatgttacttcacaaaggacatgtcagatccttcttcatggacttttttagttactgttttttctctcaaacttgttttcgaatctcctgggagtgagggagaaacagggagctgaatcctcccccaagctgttccaggccagaggactctgcagtaccttctcctacatctagtaacaaagaatggtgataaccatgcactggttcaaggttctggagttctccatgaaacttgggttaattttgctcagagtatccagagttagccactaggctgcgggtgaaatgggatggagaagaacaacagcaggcttcctggagccacatgggctgactagggcactctgtggctggcctggcatgggctcagcccaggaagaggagaaacgatcccttgcctgcccctccctgtggcagggctaactgcctggccctcctggctcgcagccagccagccccctggcagcaggttctcctcagggcttgggtcttcaacctgtggcgacaggaggcagggcagactgtggaggacaggatgcaggtcagggagagggaaggcaggggtggaccgccatgagcatgaaaagacccgaagcaagttgactcttgcaatgtgcaactgttatgttctgcaaaatgagcaacgatgtatcaaattgatgcaaatttagatgttgatacttacaataaagtttttaatgtgtttta

SEQ ID NO: 2605 - DNA, 1860 bp, Artificial
  cDNA Sequence
gttcgtcagcggcgagtggcctcgcggcgccggattcgtcgctccgccaagagtgcgcctgcgcggtcgctggggctcgcacttcagcttcccctcccccggcgccctctggggctccgagcccggcgggaccatgttcaccagcaccggctccagtgggctctgtgagcgcctctgtcgaagagccttctgctggtccccagtgccctctccctcctgctcgccctcctcctgcctcactgccagaagctctttgtgtatgaccttcacgcagtcaagaacgacttccagatgtccggtctgtgctacgacagcaaaatgttccaggtgcatcaggtgctctgcatccccagctggatggcaaaattcttttcttggacacttgaacccatcttctcttcttcagaacccaccagcgaagccagaattgggatgggagccacgctggacatccagagacagcagagaatggagctgctggaccggcagctgatgttctctcagtttgcacaagggaggcgacagagacagcagcaggtaaaagaatgatcaattggaatcgtctttttcctcctttacgtcagcgacaaaacgtaaactatcagggcggtcggcagtctgagccagcagcgccccctctagaagtttctgaggaacaggtcgcccggctcatggagatgggattttccagaggtgatgctttggaagccctgagagcttcaaacaatgacctcaatgtcgccaccaacttcctgctgcagcactgatagtcccaggccaacactgggaccggaccggcagccgagtgacagtgcgtggtccccaccatcagatcagcccggggaccgagcatctctggtgctgatgttcttgtgggaagagggaggttccaccgcacccctgccctcaaccgcaagactgttgccgttttagtgtggagataagtttgccattacattagcatgtattttctatctatattttttattgggcattttccctaggttggagagtcagcactcgttttgaatgtgtttaaaatgcattaaaatggaagatttctgcaggcagttgaatggcactccagatggggaattgctgtaaccctcttactgtaacatgtcatctcctgcgtcgtgatggggagagggtaatgttacttcacaaaggacatgtcagatccttcttcatggacttttttagttactgttttttctctcaaacttgttttcgaatctcctgggagtgagggagaaacagggagctgaatcctcccccaagctgttccaggccagaggactctgcagtaccttctcctacatctagtaacaaagaatggtgataaccatgcactggttcaaggttctggagttctccatgaaacttgggttaattttgctcagagtatccagagttagccactaggctgcgggtgaaatgggatggagaagaacaacagcaggcttcctggagccacatgggctgactagggcactctgtggctggcctggcatgggctcagcccaggaagaggagaaacgatcccttgcctgcccctccctgtggcagggctaactgcctggccctcctggctcgcagccagccagccccctggcagcaggttctcctcagggcttgggtcttcaacctgtggcgacaggaggcagggcagactgtggaggacaggatgcaggtcagggagagggaaggcaggggtggaccgccatgagcatgaaaagacccgaagcaagttgactcttgcaatgtgcaactgttatgttctgcaaaatgagcaacgatgtatcaaattgatgcaaatttagatgttgatacttacaataaagtttttaatgtgtttta

SEQ ID NO: 2606 - DNA, 2817 bp, Artificial
  cDNA Sequence
gcgcatgctctgttgcggtccgcttcggtttctgttgcgggacccggggtgtctcctagcgcaaccggaactagccttctgggggccggcttcctttatctctggcggccttgtagtcgtctccgagactccccacccctccttccctcttgaccccctaggtttgattgccctttccccgaaacaactatcatgagcgcgaggctgccggtgttgtctccacctcggtggccgcggctgttgctgctgtcgctgctcctgctgggggcggttcctggcccgcgccggagcggcgctttctacctgcccggcctggcgcccgtcaacttctgcgacgaagaaaaaaagagcgacgagtgcaaggccgaaatagaactatttgtgaacagacttgattcagtggaatcagttcttccttatgaatacacagcgtttgatttttgccaagcatcagaaggaaagcgcccatctgaaaatcttggtcaggtactattcggggaaagaattgaaccttcaccatataagtttacgtttaataagaaggagacctgtaagcttgtttgtacaaaaacataccatacagagaaagctgaagacaaacaaaagttagaattcttgaaaaaaagcatgttattgaattatcaacatcactggattgtggataatatgcctgtaacgtggtgttacgatgttgaagatggtcagaggttctgtaatcctggatttcctattggctgttacattacagataaaggccatgcaaaagatgcctgtgttattagttcagatttccatgaaagagatacattttacatcttcaaccatgttgacatcaaaatatactatcatgttgttgaaactgggtccatgggagcaagattagtggctgctaaacttgaaccgaaaagcttcaaacatacccatatagataaaccagactgctcagggccccccatggacataagtaacaaggcttctggggagataaaaattgcctatacttactctgttagcttcgaggaagatgataagatcagatgggcgtctagatgggactatattctggagtctatgcctcatacccacattcagtggtttagcattatgaattccctggtcattgttctcttcttatctggaatggtagctatgattatgttacggacactgcacaaagatattgctagatataatcagatggactctacggaagatgcccaggaagaatttggctggaaacttgttcatggtgatatattccgtcctccaagaaaagggatgctgctatcagtctttctaggatccgggacacagattttaattatgacctttgtgactctatttttcgcttgcctgggatttttgtcacctgccaaccgaggagcgctgatgacgtgtgctgtggtcctgtgggtgctgctgggcacccctgcaggctatgttgctgccagattctataagtcctttggaggtgagaagtggaaaacaaatgttttattaacatcatttctttgtcctgggattgtatttgctgacttctttataatgaatctgatcctctggggagaaggatcttcagcagctattccttttgggacactggttgccatattggccctttggttctgcatatctgtgcctctgacgtttattggtgcatactttggttttaagaagaatgccattgaacacccagttcgaaccaatcagattccacgtcagattcctgaacagtcgttctacacgaagcccttgcctggtattatcatgggagggattttgccctttggctgcatctttatacaacttttcttcattctgaatagtatttggtcacaccagatgtattacatgtttggcttcctatttctggtgtttatcattttggttattacctgttctgaagcaactatacttctttgctatttccacctatgtgcagaggattatcattggcaatggcgttcattccttacgagtggctttactgcagtttatttcttaatctatgcagtacactacttcttttcaaaactgcagatcacgggaacagcaagcacaattctgtactttggttataccatgataatggttttgatcttctttctttttacaggaacaattggcttctttgcatgcttttggtttgttaccaaaatatacagtgtggtgaaggttgactgaagaagtccagtgtgtccagttaaaacagaaataaattaaactcttcatcaacaaagacctgtttttgtgactgccttgagttttatcagaattattggcctagtaatccttcagaaacaccgtaattctaaataaacctcttcccatacacctttcccccataagatgtgtcttcaacactataaagcatttgtattgtgatttgattaagtatatatttggttgttctcaatgaagagcaaatttaaatattatgtgcatttgtaaatacagtagctataaaattttccatacttctaatggcagaatagaggaggccatattaaataatactgatgaaaggcaggacactgcattgtaaataggattttctaggctcggtaggcagaaagaattatttttctttgaaggaaataactttttatcatggtaattttgaaggatgattcctatgatgtgttcaccaggggaatgtggcttttaaagaaaatcttctattggttgtaactgttcatatcttcttacttttctgtgttgacttcattattcccatggtattggccttttaaactatgtgcctctgagtctttcaatttataaatttgttatcttaataaatattataaaaatgtc

SEQ ID NO: 2607 - DNA, 2817 bp, Artificial; identical to SEQ ID NO: 2606
  cDNA Sequence

SEQ ID NO: 2608 - DNA, 2817 bp, Artificial; identical to SEQ ID NO: 2606
  cDNA Sequence

SEQ ID NO: 2609 - DNA, 1954 bp, Artificial
  cDNA Sequence
gcgcatgctctgttgcggtccgcttcggtttctgttgcgggacccggggtgtctcctagcgcaaccggaactagccttctgggggccggcttcctttatctctggcggccttgtagtcgtctccgagactccccacccctccttccctcttgaccccctaggtttgattgccctttccccgaaacaactatcatgagcgcgaggctgccggtgttgtctccacctcggtggccgcggctgttgctgctgtcgctgctcctgctgggggcggttcctggcccgcgccggagcggcgctttctacctgcccggcctggcgcccgtcaacttctgcgacgaagaaaaaaagagcgacgagtgcaaggccgaaatagaactatttgtgaacagacttgattcagtggaatcagttcttccttatgaatacacagcgtttgatttttgccaagcatcagaaggaaagcgcccatctgaaaatcttggtcaggtactattcggggaaagaattgaaccttcaccatataagtttacgtttaataagaaggagacctgtaagcttgtttgtacaaaaacataccatacagagaaagctgaagacaaacaaaagttagaattcttgaaaaaaagcatgttattgaattatcaacatcactggattgtggataatatgcctgtaacgtggtgttacgatgttgaagatggtcagaggttctgtaatcctggatttcctattggctgttacattacagataaaggccatgcaaaagatgcctgtgttattagttcagatttccatgaaagagatacattttacatcttcaaccatgttgacatcaaaatatactatcatgttgttgaaactgggtccatgggagcaagattagtggctgctaaacttgaaccgaaaagcttcaaacatacccatatagataaaccagactgctcagggccccccatggacataagtaacaaggcttctggggagataaaaattgcctatacttactctgttagcttcgaggaagatgataagatcagatgggcgtctagatgggactatattctggagtctatgcctcatacccacattcagtggtttagcattatgaattccctggtcattgttctcttcttatctggaatggtagctatgattatgttacggacactgcacaaagatattgctagatataatcagatggactctacggaagatgcccaggaagaatttggctggaaacttgttcatggtgatatattccgtcctccaagaaaagggatgctgctatcagtctttctaggatccgggacacagattttaattatgacctttgtgactctatttttcgcttgcctgggatttttgtcacctgccaaccgaggagcgctgatgacgtgtgctgtggtcctgtgggtgctgctgggcacccctgcaggctatgttgctgccagattctataagtcctttggaggtgagaagtggaaaacaaatgttttattaacatcatttctttgtcctgggattgtatttgctgacttctttataatgaatctgatcctctggggagaaggatcttcagcagctattccttttgggacactggttgccatattggccctttggttctgcatatctgtgcctctgacgtttattggtgcatactttggttttaagaagaatgccattgaacacccagttcgaaccaatcagattccacgtcagattcctgaacagtcgttctacacgaagcccttgcctggtattatcatgggagggattttgccctttggctgcatctttatacaacttttcttcattctgaatagtatttggtcacaccagatgtattacatgtttggcttcctatttctggtgtttatcattttggttattacctgttctgaagcaactatacttctttgctatttccacctatgtgcagaggtatgtatta

SEQ ID NO: 2610 - DNA, 1807 bp, Artificial
  cDNA Sequence
gcgcatgctctgttgcggtccgcttcggtttctgttgcgggacccggggtgtctcctagcgcaaccggaactagccttctgggggccggcttcctttatctctggcggccttgtagtcgtctccgagactccccacccctccttccctcttgaccccctaggtttgattgccctttccccgaaacaactatcatgagcgcgaggctgccggtgttgtctccacctcggtggccgcggctgttgctgctgtcgctgctcctgctgggggcggttcctggcccgcgccggagcggcgctttctacctgcccggcctggcgcccgtcaacttctgcgacgaagaaaaaaagagcgacgagtgcaaggccgaaatagaactatttgtgaacagacttgattcagtggaatcagttcttccttatgaatacacagcgtttgatttttgccaagcatcagaaggaaagcgcccatctgaaaatcttggtcaggtactattcggggaaagaattgaaccttcaccatataagtttacgtttaataagaaggagacctgtaagcttgtttgtacaaaaacataccatacagagaaagctgaagacaaacaaaagttagaattcttgaaaaaaagcatgttattgaattatcaacatcactggattgtggataatatgcctgtaacgtggtgttacgatgttgaagatggtcagaggttctgtaatcctggatttcctattggctgttacattacagataaaggccatgcaaaagatgcctgtgttattagttcagatttccatgaaagagatacattttacatcttcaaccatgttgacatcaaaatatactatcatgttgttgaaactgggtccatgggagcaagattagtggctgctaaacttgaaccgaaaagcttcaaacatacccatatagataaaccagactgctcagggccccccatggacataagtaacaaggcttctggggagataaaaattgcctatacttactctgttagcttcgaggaagatgataagatcagatgggcgtctagatgggactatattctggagtctatgcctcatacccacattcagtggtttagcattatgaattccctggtcattgttctcttcttatctggaatggtagctatgattatgttacggacactgcacaaagatattgctagatataatcagatggactctacggaagatgcccaggaagaatttggctggaaacttgttcatggtgatatattccgtcctccaagaaaagggatgctgctatcagtctttctaggatccgggacacagattttaattatgacctttgtgactctatttttcgcttgcctgggatttttgtcacctgccaaccgaggagcgctgatgacgtgtgctgtggtcctgtgggtgctgctgggcacccctgcaggctatgttgctgccagattctataagtgtaagtcaaagccactgtgactggcgtctgatcaggaagggactctgctgcggctgtggatctgacctgggtatcagatggtgatgctttgtaaatagtgtgcctcataggggtctgttcttagttaaaaggagcctgcttggtgattccttttgtgtcatgagttactatcccaaaatttatttgttcgaaaatgtttagtgaaacaagcaaattgtgccacttatccactatcccctccctctttttttctttaagctttggctaacaggttgggctgaacagcttagatttgctgtgttcatagaagcacatatagactaataaaggagaaaagtatacaaa

SEQ ID NO: 2611 - DNA, 383 bp, Artificial
  cDNA Sequence
agcgcaaccggaactagccttctgggggccggcttcctttatctctggcggccttgtagtcgtctccgagactccccacccctccttccctcttgaccccctaggtttgattgccctttccccgaaacaactatcatgagcgcgaggctgccggtgttgtctccacctcggtggccgcggctgttgctgctgtcgctgctcctgctgggggcggttcctggcccgcgccggagcggcgctttctacctgcccggcctggcgcccgtcaacttctgcgacgaagaaaaaaagagcgacgagtgcaaggccgaaatagaactatttgtgaacagacttgattcagtggaatcagttcttccttatgaatacacagcgtaagtttt

SEQ ID NO: 2612 - DNA, 2165 bp, Artificial
  cDNA Sequence
ggattgtggataatatgcctgtaacgtggtgttacgatgttgaagatggtcagaggttctgtaatcctggatttcctattggctgttacattacagataaaggccatgcaaaagatgcctgtgttattagttcagatttccatgaaagagatacattttacatcttcaaccatgttgacatcaaaatatactatcatgttgttgaaactgggtccatgggagcaagattagtggctgctaaacttgaaccgaaaagcttcaaacatacccatatagataaaccagactgctcagggccccccatggacataagtaacaaggcttctggggagataaaaattgcctatacttactctgttagcttcgaggaagatgataagatcagatgggcgtctagatgggactatattctggagtctatgcctcatacccacattcagtggtttagcattatgaattccctggtcattgttctcttcttatctggaatggtagctatgattatgttacggacactgcacaaagatattgctagatataatcagatggactctacggaagatgcccaggaagaatttggctggaaacttgttcatggtgatatattccgtcctccaagaaaagggatgctgctatcagtctttctaggatccgggacacagattttaattatgacctttgtgactctatttttcgcttgcctgggatttttgtcacctgccaaccgaggagcgctgatgacgtgtgctgtggtcctgtgggtgctgctgggcacccctgcaggctatgttgctgccagattctataagtcctttggaggtgagaagtggaaaacaaatgttttattaacatcatttctttgtcctgggattgtatttgctgacttctttataatgaatctgatcctctggggagaaggatcttcagcagctattccttttgggacactggttgccatattggccctttggttctgcatatctgtgcctctgacgtttattggtgcatactttggttttaagaagaatgccattgaacacccagttcgaaccaatcagattccacgtcagattcctgaacagtcgttctacacgaagcccttgcctggtattatcatgggagggattttgccctttggctgcatctttatacaacttttcttcattctgaatagtatttggtcacaccagatgtattacatgtttggcttcctatttctggtgtttatcattttggttattacctgttctgaagcaactatacttctttgctatttccacctatgtgcagaggattatcattggcaatggcgttcattccttacgagtggctttactgcagtttatttcttaatctatgcagtacactacttcttttcaaaactgcagatcacgggaacagcaagcacaattctgtactttggttataccatgataatggttttgatcttctttctttttacaggaacaattggcttctttgcatgcttttggtttgttaccaaaatatacagtgtggtgaaggttgactgaagaagtccagtgtgtccagttaaaacagaaataaattaaactcttcatcaacaaagacctgtttttgtgactgccttgagttttatcagaattattggcctagtaatccttcagaaacaccgtaattctaaataaacctcttcccatacacctttcccccataagatgtgtcttcaacactataaagcatttgtattgtgatttgattaagtatatatttggttgttctcaatgaagagcaaatttaaatattatgtgcatttgtaaatacagtagctataaaattttccatacttctaatggcagaatagaggaggccatattaaataatactgatgaaaggcaggacactgcattgtaaataggattttctaggctcggtaggcagaaagaattatttttctttgaaggaaataactttttatcatggtaattttgaaggatgattcctatgatgtgttcaccaggggaatgtggcttttaaagaaaatcttctattggttgtaactgttcatatcttcttacttttctgtgttgacttcattattcccatggtattggccttttaaactatgtgcctctgagtctttcaatttataaatttgttatcttaataaatattataaaaatgtc

SEQ ID NO: 2613 - DNA, 2165 bp, Artificial; identical to SEQ ID NO: 2612
  cDNA Sequence

SEQ ID NO: 2614 - DNA, 2165 bp, Artificial; identical to SEQ ID NO: 2612
  cDNA Sequence

SEQ ID NO: 2615 - DNA, 1302 bp, Artificial
  cDNA Sequence
ggattgtggataatatgcctgtaacgtggtgttacgatgttgaagatggtcagaggttctgtaatcctggatttcctattggctgttacattacagataaaggccatgcaaaagatgcctgtgttattagttcagatttccatgaaagagatacattttacatcttcaaccatgttgacatcaaaatatactatcatgttgttgaaactgggtccatgggagcaagattagtggctgctaaacttgaaccgaaaagcttcaaacatacccatatagataaaccagactgctcagggccccccatggacataagtaacaaggcttctggggagataaaaattgcctatacttactctgttagcttcgaggaagatgataagatcagatgggcgtctagatgggactatattctggagtctatgcctcatacccacattcagtggtttagcattatgaattccctggtcattgttctcttcttatctggaatggtagctatgattatgttacggacactgcacaaagatattgctagatataatcagatggactctacggaagatgcccaggaagaatttggctggaaacttgttcatggtgatatattccgtcctccaagaaaagggatgctgctatcagtctttctaggatccgggacacagattttaattatgacctttgtgactctatttttcgcttgcctgggatttttgtcacctgccaaccgaggagcgctgatgacgtgtgctgtggtcctgtgggtgctgctgggcacccctgcaggctatgttgctgccagattctataagtcctttggaggtgagaagtggaaaacaaatgttttattaacatcatttctttgtcctgggattgtatttgctgacttctttataatgaatctgatcctctggggagaaggatcttcagcagctattccttttgggacactggttgccatattggccctttggttctgcatatctgtgcctctgacgtttattggtgcatactttggttttaagaagaatgccattgaacacccagttcgaaccaatcagattccacgtcagattcctgaacagtcgttctacacgaagcccttgcctggtattatcatgggagggattttgccctttggctgcatctttatacaacttttcttcattctgaatagtatttggtcacaccagatgtattacatgtttggcttcctatttctggtgtttatcattttggttattacctgttctgaagcaactatacttctttgctatttccacctatgtgcagaggtatgtatta

SEQ ID NO: 2616 - DNA, 1155 bp, Artificial
  cDNA Sequence
ggattgtggataatatgcctgtaacgtggtgttacgatgttgaagatggtcagaggttctgtaatcctggatttcctattggctgttacattacagataaaggccatgcaaaagatgcctgtgttattagttcagatttccatgaaagagatacattttacatcttcaaccatgttgacatcaaaatatactatcatgttgttgaaactgggtccatgggagcaagattagtggctgctaaacttgaaccgaaaagcttcaaacatacccatatagataaaccagactgctcagggccccccatggacataagtaacaaggcttctggggagataaaaattgcctatacttactctgttagcttcgaggaagatgataagatcagatgggcgtctagatgggactatattctggagtctatgcctcatacccacattcagtggtttagcattatgaattccctggtcattgttctcttcttatctggaatggtagctatgattatgttacggacactgcacaaagatattgctagatataatcagatggactctacggaagatgcccaggaagaatttggctggaaacttgttcatggtgatatattccgtcctccaagaaaagggatgctgctatcagtctttctaggatccgggacacagattttaattatgacctttgtgactctatttttcgcttgcctgggatttttgtcacctgccaaccgaggagcgctgatgacgtgtgctgtggtcctgtgggtgctgctgggcacccctgcaggctatgttgctgccagattctataagtgtaagtcaaagccactgtgactggcgtctgatcaggaagggactctgctgcggctgtggatctgacctgggtatcagatggtgatgctttgtaaatagtgtgcctcataggggtctgttcttagttaaaaggagcctgcttggtgattccttttgtgtcatgagttactatcccaaaatttatttgttcgaaaatgtttagtgaaacaagcaaattgtgccacttatccactatcccctccctctttttttctttaagctttggctaacaggttgggctgaacagcttagatttgctgtgttcatagaagcacatatagactaataaaggagaaaagtatacaaa

SEQ ID NO: 2617 - DNA, 854 bp, Artificial
  cDNA Sequence
gagtatttttattagcgaagtttcttaaaatgcaagtttatcattaaaatgcaagaatcttaggcagtgttccaactctattttttaaaacttttggcaatccaatatagttgtgatgtttaatatccccgtataatgtttcattttgcaaacctggtgcagtaaatagtatatatttctagatattaagagctcagtgtgcctggaatgactggtctggttagctgcccccggcataaagaaaagaataattattccattccattccattattttcttaaaaaaaaaaaaaaaacctacatataggtctaaatgttgacatctaaacatctagttataatttaaagcaatacttttagtaggtattactaggaattcttttttttttttttttttggttgcataatcttactctgatttcccctagactttagtaaatctgaaactctccaaatctcaggactaaccaaagttagataatttagaaattgcagttgttgactcaatggaaggacaagctttgaatgggatttttttttgttcttaatgtgctgtcagcagatgtttacttaaagagattttttaatctcctctaggaagatgataagatcagatgggcgtctagatgggactatattctggagtctatgcctcatacccacattcagtggtttagcattatgaattccctggtcattgttctcttcttatctggaatggtagctatgattatgttacggacactgcacaaagatattgctagatataatcagatggactctacggtaagtggaaacattttagtctttagtctgccaaggacactgtttattgttattttgcaaaaaggtaaa

SEQ ID NO: 2618 - DNA, 1719 bp, Artificial
  cDNA Sequence
agcattatgaattccctggtcattgttctcttcttatctggaatggtagctatgattatgttacggacactgcacaaagatattgctagatataatcagatggactctacggaagatgcccaggaagaatttggctggaaacttgttcatggtgatatattccgtcctccaagaaaagggatgctgctatcagtctttctaggatccgggacacagattttaattatgacctttgtgactctatttttcgcttgcctgggatttttgtcacctgccaaccgaggagcgctgatgacgtgtgctgtggtcctgtgggtgctgctgggcacccctgcaggctatgttgctgccagattctataagtcctttggaggtgagaagtggaaaacaaatgttttattaacatcatttctttgtcctgggattgtatttgctgacttctttataatgaatctgatcctctggggagaaggatcttcagcagctattccttttgggacactggttgccatattggccctttggttctgcatatctgtgcctctgacgtttattggtgcatactttggttttaagaagaatgccattgaacacccagttcgaaccaatcagattccacgtcagattcctgaacagtcgttctacacgaagcccttgcctggtattatcatgggagggattttgccctttggctgcatctttatacaacttttcttcattctgaatagtatttggtcacaccagatgtattacatgtttggcttcctatttctggtgtttatcattttggttattacctgttctgaagcaactatacttctttgctatttccacctatgtgcagaggattatcattggcaatggcgttcattccttacgagtggctttactgcagtttatttcttaatctatgcagtacactacttcttttcaaaactgcagatcacgggaacagcaagcacaattctgtactttggttataccatgataatggttttgatcttctttctttttacaggaacaattggcttctttgcatgcttttggtttgttaccaaaatatacagtgtggtgaaggttgactgaagaagtccagtgtgtccagttaaaacagaaataaattaaactcttcatcaacaaagacctgtttttgtgactgccttgagttttatcagaattattggcctagtaatccttcagaaacaccgtaattctaaataaacctcttcccatacacctttcccccataagatgtgtcttcaacactataaagcatttgtattgtgatttgattaagtatatatttggttgttctcaatgaagagcaaatttaaatattatgtgcatttgtaaatacagtagctataaaattttccatacttctaatggcagaatagaggaggccatattaaataatactgatgaaaggcaggacactgcattgtaaataggattttctaggctcggtaggcagaaagaattatttttctttgaaggaaataactttttatcatggtaattttgaaggatgattcctatgatgtgttcaccaggggaatgtggcttttaaagaaaatcttctattggttgtaactgttcatatcttcttacttttctgtgttgacttcattattcccatggtattggccttttaaactatgtgcctctgagtctttcaatttataaatttgttatcttaataaatattataaaaatgtc

SEQ ID NO: 2619 - DNA, 1719 bp, Artificial; identical to SEQ ID NO: 2618
  cDNA Sequence

SEQ ID NO: 2620 - DNA, 856 bp, Artificial
  cDNA Sequence
agcattatgaattccctggtcattgttctcttcttatctggaatggtagctatgattatgttacggacactgcacaaagatattgctagatataatcagatggactctacggaagatgcccaggaagaatttggctggaaacttgttcatggtgatatattccgtcctccaagaaaagggatgctgctatcagtctttctaggatccgggacacagattttaattatgacctttgtgactctatttttcgcttgcctgggatttttgtcacctgccaaccgaggagcgctgatgacgtgtgctgtggtcctgtgggtgctgctgggcacccctgcaggctatgttgctgccagattctataagtcctttggaggtgagaagtggaaaacaaatgttttattaacatcatttctttgtcctgggattgtatttgctgacttctttataatgaatctgatcctctggggagaaggatcttcagcagctattccttttgggacactggttgccatattggccctttggttctgcatatctgtgcctctgacgtttattggtgcatactttggttttaagaagaatgccattgaacacccagttcgaaccaatcagattccacgtcagattcctgaacagtcgttctacacgaagcccttgcctggtattatcatgggagggattttgccctttggctgcatctttatacaacttttcttcattctgaatagtatttggtcacaccagatgtattacatgtttggcttcctatttctggtgtttatcattttggttattacctgttctgaagcaactatacttctttgctatttccacctatgtgcagaggtatgtatta

SEQ ID NO: 2621 - DNA, 633 bp, Artificial
  cDNA Sequence
agttttcgcttgcctgggatttttgtcacctgccaaccgaggagcgctgatgacgtgtgctgtggtcctgtgggtgctgctgggcacccctgcaggctatgttgctgccagattctataagtcctttggaggtgagaagtggaaaacaaatgttttattaacatcatttctttgtcctgggattgtatttgctgacttctttataatgaatctgatcctctggggagaaggatcttcagcagctattccttttgggacactggttgccatattggccctttggttctgcatatctgtgcctctgacgtttattggtgcatactttggttttaagaagaatgccattgaacacccagttcgaaccaatcagattccacgtcagattcctgaacagtcgttctacacgaagcccttgcctggtattatcatgggagggattttgccctttggctgcatctttatacaacttttcttcattctgaatagtatttggtcacaccagatgtattacatgtttggcttcctatttctggtgtttatcattttggttattacctgttctgaagcaactatacttctttgctatttccacctatgtgcagaggattatcattggcaatggcgttcattcct

SEQ ID NO: 2622 - DNA, 614 bp, Artificial
  cDNA Sequence
agttttcgcttgcctgggatttttgtcacctgccaaccgaggagcgctgatgacgtgtgctgtggtcctgtgggtgctgctgggcacccctgcaggctatgttgctgccagattctataagtcctttggaggtgagaagtggaaaacaaatgttttattaacatcatttctttgtcctgggattgtatttgctgacttctttataatgaatctgatcctctggggagaaggatcttcagcagctattccttttgggacactggttgccatattggccctttggttctgcatatctgtgcctctgacgtttattggtgcatactttggttttaagaagaatgccattgaacacccagttcgaaccaatcagattccacgtcagattcctgaacagtcgttctacacgaagcccttgcctggtattatcatgggagggattttgccctttggctgcatctttatacaacttttcttcattctgaatagtatttggtcacaccagatgtattacatgtttggcttcctatttctggtgtttatcattttggttattacctgttctgaagcaactatacttctttgctatttccacctatgtgcagaggtatgtatta

SEQ ID NO: 2623 - DNA, 500 bp, Artificial
  cDNA Sequence
ttctatagcctttggaggtgagaagtggaaaacaaatgttttattaacatcatttctttgtcctgggattgtatttgctgacttctttataatgaatctgatcctctggggagaaggatcttcagcagctattccttttgggacactggttgccatattggccctttggttctgcatatctgtgcctctgacgtttattggtgcatactttggttttaagaagaatgccattgaacacccagttcgaaccaatcagattccacgtcagattcctgaacagtcgttctacacgaagcccttgcctggtattatcatgggagggattttgccctttggctgcatctttatacaacttttcttcattctgaatagtatttggtcacaccagatgtattacatgtttggcttcctatttctggtgtttatcattttggttattacctgttctgaagcaactatacttctttgctatttccacctatgtgcagaggtatgtatta

SEQ ID NO: 2624 - DNA, 606 bp, Artificial
  cDNA Sequence
catctagcattcaaattctttggaatctagactgatacctgaaaatcaagccatacattgttttcatgaattatctcatttactctacataatagtctatggaggcaatgaggacagataaatttctccctagttaatatgataaatgggcttggagatgtcagtggacttgcccaaggatgacacacacagtttgtgacagagctgctctgttctctgctaccatgctgtccctcattttcagctaggatgcatttttgttactatctaatcatgtcacttttaacattttgtaaaaacttactgagttattttattataattctttgaagactgataacttccaataactgtacttagaaaatatccccatttaatcattatttgaacctgttttaatgtattcatctcataccttaaaaaattctagtagcgttttccattttgttgtaaaatattcttaaataggaaaggacagttgacatccttcagtcttttctatgtagtaaggaaaataatgtgtattgtagaaagcttaggtaatcttatagtagaaaaaaacgtgctcatagatctgtagtatattcccggtgggtaatagtttat

SEQ ID NO: 2625 - DNA, 888 bp, Artificial
  cDNA Sequence
aaagggcggggcgcgcgcgtcgggaagatggcgctacgtctgctgcggagggcggcgcgcggagctgcggcggcggcgctgctgaggctgaaagcgtctctagcagctgatatccccagacttggatatagttcctcatcccatcacaagtacatcccccggagggcagtgctttatgtacctggaaatgatgaaaagaaaataaagaagattccatccctgaatgtagattgtgcagtgctcgactgtgaggatggagtggctgcaaacaaaaagaatgaagctcgactgagaattgtaaaaactcttgaagacattgatctgggccctactgaaaaatgtgtgagagtcaactcagtttccagtggtctggcggaagaagacctagagacccttttgcaatcccgggtccttccttccagcctgatgctaccaaaggtggaaagtcctgaagaaatccagtggtttgcagacaaattttcattccacttaaaaggccgaaaacttgaacaaccaatgaatttaatcccttttgtggaaactgcaatgggtttgctcaattttaaggcagtgtgtgaagaaaccctgaaggtcgggcctcaagtaggtctctttctagatgcagtcgtttttggaggagaagactttcgagccagcataggtgtcaaagacatctctctctctctttttctgtgtgcaacaagtagtaaagaaaccctggatattctctacgcccggcaaaagattgttgtcatagcgaaagcctttggtctccaagccatagatctggtgtacattgactttcgagatggagctgggctgcttagacagtcacgagaaggagccgccatgggcttcactggtaagcaggtgattcaccctaaccaa

SEQ ID NO: 2626 - DNA, 591 bp, Artificial
  cDNA Sequence
aaagggcggggcgcgcgcgtcgggaagatggcgctacgtctgctgcggagggcggcgcgcggagctgcggcggcggcgctgctgaggctgaaagcgtctctagcagctgatatccccagacttggatatagttcctcatcccatcacaagtacatcccccggagggcagtgctttatgtacctggaaatgatgaaaagaaaataaagaagattccatccctgaatgtagattgtgcagtgctcgactgtgaggatggagtggctgcaaacaaaaagaatgaagctcgactgagaattgtaaaaactcttgaagacattgatctgggccctactgaaaaatgtgtgagagtcaactcagtttccagtggtctggcggaagaagacctagagacccttttgcaatcccgggtccttccttccagcctgatgctaccaaaggtggaaagtcctgaagaaatccagtgggcagtgtgtgaagaaaccctgaaggtcgggcctcaagtaggtctctttctagatgcagtcgtttttggaggagaagactttcgagccagcataggtgtcaaagacatctctctctctctttttctg

SEQ ID NO: 2627 - DNA, 596 bp, Artificial
  cDNA Sequence
tgacctgctgttcaccgtggccttaccgggaagggtggtgtgttatgtgctgggctccagctggcctttcggcaaggggctctgcaggctgacggcgtttgtgctctacaccgacacctacggggggtctacctcatggcctgtgtgagcgtggaccattacccagctgcgtgagccactgcgcccggccaagtctgatgccatttatggagcattttgacgtgggtgattttgtgtttcgtaaagcattaggttggtgcaaaactgctgttctgccgtgacttgtgcaccaacctaatagaatgtgtgctttcctgccaagcgcatgttcctgacgacagtccctggcctttccctctgcccccaccgtccccccacactccggcggttcagacaggaataagcgtggagtcctgcctcaagccctccccagtcgctgtcccccagagaccctcttctctcctgatgcttcttgcatcttccaatttccggctacgttttggacatttgactctcttcaaggcagaacttcacatacactttcttgagtggggaatgtctcatcctgtgacgttgtgataaaataagaaatacgt

SEQ ID NO: 2628 - DNA, 293 bp, Artificial
  cDNA Sequence
acacattaaaaactttattgtaagtatcaacatctaaatttgcatcaatttgatacatcgttgctcattttgcagaacataacagttgcacattgcaagagtcaacttgcttcgggtcttttcatgctcatggcggtccacccctgccttccctctccctgacctgcatcctgtcctccacagtctgccctgcctcctccctgccacagggaggggcaggcaagggatcgtttctcctcttcctgggctgagcccatgccaggccagccacagagtgccctagtcagcccatg

SEQ ID NO: 2629 - DNA, 748 bp, Artificial
  cDNA Sequence
ataaaaggaggtctgcacagcctctcttaaaacaacatgccacagttaaaacttacttcagtttggacaactactcacagctactacacagagacccgaacgagtcactgatatacacctggaccaccaccaatggatatacaaatggcaaacaattttactccgccctctgcaactcctcagggaaatgactgtgacctctatgcacatcacagcacggccaggatagtaatgcctctgcattacagcctcgtcttcatcattgggctcgtgggaaacttactagccttggtcgtcattgttcaaaacaggaaaaaaatcaactctaccaccctctattcaacaaatttggtgatttctgatatactttttaccaccgctttgcctacacgaatagcctactatgcaatgggctttgactggagaatcggagatgccttgtgtaggataactgcgctagtgttttacatcaacacatatgcaggtgtgaactttatgacctgcctgagtattgaccgcttcattgctgtggtgcaccctctacgctacaacaagataaaaaggattgaacatgcaaaaggcgtgtgcatatttgtctggattctagtatttgctcagacactcccactcctcatcaaccctatgtcaaagcaggaggctgaaaggattacatgcatggagtatccaaactttgaagaaactaaatctcttccctggattctgcttggggcatgtttcataggatatg

SEQ ID NO: 2630 - DNA, 818 bp, Artificial
  cDNA Sequence
gcccagcaccaactccgacgccaagcgttacactggaaactactttttaaagcaacaaaagagtctaaaacaaaatacaacatttcttaaatacactgtttccagaaagagctattttaacagaagcaactcaaagatatcccttcgacagaagtggaagtgctgaaaaatgctcatctctcacacagacttttgatggacaggagtttctaagtatcatgcctaccaacaagctgtaaaatgatcaccctgaacaatcaagatcaacctgtcccttttaacagctcacatccagatgaatacaaaattgcagcccttgtcttctatagctgtatcttcataattggattatttgttaacatcactgcattatgggttttcagttgtaccaccaagaagagaaccacggtaaccatctatatgatgaatgtggcattagtggacttgatatttataatgactttaccctttcgaatgttttattatgcaaaagatgaatggccatttggagagtacttctgccagattcttggagctctcacagtgttttacccaagcattgctttatggcttcttgcctttattagtgctgacagatacatggccattgtacagccgaagtacgccaaagaacttaaaaacacgtgcaaagccgtgctggcgtgtgtgggagtctggataatgaccctgaccacgaccacccctctgctactgctctataaagacccagataaagactccactcccgccacctgcctcaagatttctgacatcatctatctaaaagctgtgaacgtgctgaacctcactcgactgac

SEQ ID NO: 2631 - DNA, 353 bp, Artificial
  cDNA Sequence
agcaccaactccgacgccaagcgttacactggaaactactttttaaagcaacaaaagagtctaaaacaaaatacaacatttcttaaatacactgtttccagaaagagctattttaacagaagcaactcaaagatatcccttcgacagaagtggaagtgctgaaaaatgctcatctctcacacagacttttgatggacaggaggtgctgctttctgtgaaccactgaagtagagcagctgaaatcacaaaacctggaagacttggctttacgtactcccaattgtgcactagaaaacagctcatctattgctctaacagtctagttcttgatctgctgaccatgacacaaaaca

SEQ ID NO: 2632 - DNA, 718 bp, Artificial
  cDNA Sequence
ctcacctctccaggttgaaacgatggcggtcagaaccgcctgaggtaaaaacgggtggcactggggaagcggaggcgtagctcccgagagcctcacacttgtgctcagtgccgcctcacccctggtggatccgcgatggccgcggattcccctggattgccggcgctgggcaggagcgccacttctaatctctcccgagactggacgcccggcgccttccacgcgcgttgtgtctttccgggcggtccctcgaagctggctaccccgcgggctgttgactgcagtgggatctggtcactcagatgcggatagagggctaaatgcaagatggtatggcatccagactctgctcataagtatctgcagtgatccataccttgattgtacatctactctgcatcctgaggacctgaacatgctaactggtggctgcagatttgtcttctaaggagcaagtgtggtctgtggacaggcagcttcagcctcacctgggattttgtttgcactagaaagtgccaagccctaccctagacctattaaagcagaactggcgtttaacaagacaccccaggtaatttgtgtgcaccttagagtctgagatgcactagtgtagtgattcgcagggggacaattttgacctccaggggacaatatctggagacatttttgggtgtcacaacgtgctggggagagggtgctactggcatctaatgggctg

SEQ ID NO: 2633 - DNA, 298 bp, Artificial
  cDNA Sequence
ccgcctcggcggagactcggaagttcacccgggcgctgagtaagccgggcacggcggccgagctgcggcagagcgtgtctgaggtggtgcgcggctccgtgctcctggcagcaggtgagccactcccagttgatcccttttccctggagtcagtcatgtgtcccggaagtgcttccagcagctgctgaagacctctgccctatgaggtcactaggagttctttcattaagtgacctgaggcaaagccaaagctaattgagccactcgactatgaaaatgtcatcgtccagaagaagac

SEQ ID NO: 2634 - DNA, 752 bp, Artificial
  cDNA Sequence
gagtttcgacagcttccgaacaaagtggtcaagttggataaacttccagttcatgtctatgaagttgacgaggaggtcgacaaagatgaggatgctgcctcccttggttcccagaagggtgggatcaccaagcatggctggctgtacaaaggcaacatgaacagtgccatcagcgtgaccatgaggtcatttaagagacgatttttccacctgattcaacttggcgatggatcctataatttgaatttttataaagatgaaaagatctccaaagaaccaaaaggatcaatatttctggattcctgtatgggtgtcgttcagaacaacaaagtcaggcgttttgcttttgagctcaagatgcaggacaaaagtagttatctcttggcagcagacagtgaagtggaaatggaagaatggatcacaattctaaataagatcctccagctcaactttgaagctgcaatgcaagaaaagcgaaatggcgactctcacgaagatgatgaacaaagcaaattggaaggttctggttccggtttagatagctacctgccggaacttgccaagagtgcaagagaagcagaaatcaaactgaaaagtgaaagcagagtcaaacttttttatttggacccagatgcccagaagcttgacttctcatcagctgagccagaagtgaagtcatttgaagagaagtttggaaaaaggatccttgtcaagtgcaatgatttatctttcaatttgcaatgctgtgttgc

SEQ ID NO: 2635 - DNA, 567 bp, Artificial
  cDNA Sequence
gtcatttaagagacgatttttccacctgattcaacttggcgatggatcctataatttgaatttttataaagatgaaaagatctccaaagaaccaaaaggatcaatatttctggattcctgtatgggtgtcgttcagaacaacaaagtcaggcgttttgcttttgagctcaagatgcaggacaaaagtagttatctcttggcagcagacagtgaagtggaaatggaagaatggatcacaattctaaataagatcctccagctcaactttgaagctgcaatgcaagaaaagcgaaatggcgactctcacgaagatgatgaacaaagcaaattggaaggttctggttccggtttagatagctacctgccggaacttgccaagagtgcaagagaagcagaaatcaaactgaaaagtgaaagcagagtcaaacttttttatttggacccagatgcccagaagcttgacttctcatcagctgagccagaagtgaagtcatttgaagagaagtttggaaaaaggatccttgtcaagtgcaatgatttatctttcaatttgcaatgctgtgttgc

SEQ ID NO: 2636 - DNA, 458 bp, Artificial
  cDNA Sequence
gaattcaaagattcagatgaggaagactctcagccccttaagtgcatttatggcagacctggtgggccagttttcacaagaagcgcctttgctgcagttttacaccatcaccaaaacccagaattttatgatgagattaaaatagagttgcccactcagctgcatgaaaagcaccacctgttgctcacattcttccatgtcagctgtgacaactcaagtaaaggaagcacgaagaagagggatgtcgttgaaacccaagttggctactcctggcttcccctcctgaaagacggaagggtggtgacaagcgagcagcacatcccggtctcggcgaaccttccttcgggctatcttggctaccaggagcttgggatgggcaggcattatggtccggaaattaaatgggtagatggaggcaagccactgctgaaaatttccactcatctggtttctacagt

SEQ ID NO: 2637 - DNA, 538 bp, Artificial
  cDNA Sequence
aagtacgcgtataaggctgagccatatgttgcctctgaatacaagacagtgcatgaagaactgaccaaatccatgaccacgattctcaagccttctgccgatttcctcaccagcaacaaactactgaagtactcatggtttttctttgatgtactgatcaaatctatggctcagcatttgatagagaactccaaagttaagttgctgcgaaaccagagatttcctgcatcctatcatcatgcagtggaaaccgttgtaaatatgctgatgccacacatcactcagaagtttcgagataatccagaggcatctaagaacgcgaatcatagccttgctgtcttcatcaagagatgtttcaccttcatggacaggggctttgtcttcaagcagatcaacaactacattagctgttttgctcctggagacccaaagaccctctttgaatacaagtttgaatttctccgtgtagtgtgcaaccatgaacattatattccgttgaacttaccaatgccatttggaaaaggcaggattcaaagat

SEQ ID NO: 2638 - DNA, 465 bp, Artificial
  cDNA Sequence
tcttcttttcagagccatcaggcaaggatagccaccctctacctgcctctgtttggtctgctgattgaaaacgtccagcggatcaatgtgagggatgtgtcacccttccctgtgaacgcgggcatgactgtgaaggatgaatccctggctctaccagctgtgaatccgctggtgacgccgcagaagggaagcaccctggacaacagcctgcacaaggacctgctgggcgccatctccggcattggtaacgctccatgctcttgtgggcttctctccaccatcactctgaaagtgtcttggagccaatagttggtgaacgtgtcacacttgtgtggtaggaccttgaagtctaagttgctttcctgagtattcttttcctgcttgtgatagtcaacaactgaaacccctcagccatgccctgaaataaaggtcccggatgcctgtgactcctcaggatcatacagt

SEQ ID NO: 2639 - DNA, 296 bp, Artificial
  cDNA Sequence
gatcaatgtgagggatgtgtcacccttccctgtgaacgcgggcatgactgtgaaggatgaatccctggctctaccagctgtgaatccgctggtgacgccgcagaagggaagcaccctggacaacagcctgcacaaggacctgctgggcgccatctccggcattgcttctccatatacaacctcaactccaaacatcaacagtgtgagaaatgctgattcgagaggatctctcataagcacagattcgggtaacagccttccagaaaggaatagtgagaagagcaattccctggata

SEQ ID NO: 2640 - DNA, 1347 bp, Artificial
  cDNA Sequence
accagtctgagattaagagcctactgatgtgtttcctctacatcttaaagagcatgtctgatgatgctttgtttacatattggaacaaggcttcaacatctgaacttatggatttttttacaatatctgaagtctgcctgcaccagttccagtacatggggaagcgatacatagccagaacaggaatgatgcatgccagattgcagcagctgggcagcctggataactctctcacttttaaccacagctatggccactcggacgcagatgttctgcaccagtcattacttgaagccaacattgctactgaggtttgcctgacagctctggacacgctttctctatttacattggcgtttaagaaccagctcctggccgaccatggacataatcctctcatgaaaaaagtttttgatgtctacctgtgttttcttcaaaaacatcagtctgaaacggctttaaaaaatgtcttcactgccttaaggtccttaatttataagtttccctcaacattctatgaagggagagcggacatgtgtgcggctctgtgttacgagattctcaagtgctgtaactccaagctgagctccatcaggacggaggcctcccagctgctctacttcctgatgaggaacaactttgattacactggaaagaagtcctttgtccggacacatttgcaagtcatcatatctgtcagccagctgatagcagacgttgttggcattgggggaaccagattccagcagtccctgtccatcatcaacaactgtgccaacagtgaccggcttattaagcacaccagcttctcctctgatgtgaaggacttaaccaaaaggatacgcacggtgctaatggccaccgcccagatgaaggagcatgagaacgacccagagatgctggtggacctccagtacagcctggccaaatcctatgccagcacgcccgagctcaggaagacgtggctcgacagcatggccaggatccatgtcaaaaatggcgatctctcagaggcagcaatgtgctatgtccacgtaacagccctagtggcagaatatctcacacggaaagcagtccagtgggagccgccccttctcccccacagccatagcgcctgcctgaggaggagccggggaggcgtgtttagacaaggatgcaccgccttcagggtcattaccccaaacatcgacgaggaggcctccatgatggaagacgtggggatgcaggatgtccatttcaacgaggatgtgctgatggagctccttgagcagtgcgcagatggactctggaaagccgagcgctacgagctcatcgccgacatctacaaacttatcatccccatttatg

SEQ ID NO: 2641 - DNA, 643 bp, Artificial
  cDNA Sequence
tttaagaaccagctcctggccgaccatggacataatcctctcatgaaaaaagtttttgatgtctacctgtgttttcttcaaaaacatcagtctgaaacggctttaaaaaatgtcttcactgccttaaggtccttaatttataagtttccctcaacattctatgaagggagagcggacatgtgtgcggctctgtgttacgagattctcaagtgctgtaactccaagctgagctccatcaggacggaggcctcccagctgctctacttcctgatgaggaacaactttgattacactggaaagaagtcctttgtccggacacatttgcaagtcatcatatctgtcagccagctgatagcagacgttgttggcattgggggaaccagattccagcagtccctgtccatcatcaacaactgtgccaacagtgaccggcttattaaggcagcaatgtgctatgtccacgtaacagccctagtggcagaatatctcacacggaaaggcgtgtttagacaaggatgcaccgccttcagggtcattaccccaaacatcgacgaggaggcctccatgatggaagacgtggggatgcaggatgtccatttcaacgaggatgtgctgatggagctccttgagcagtgcgcagatg

SEQ ID NO: 2642 - DNA, 1196 bp, Artificial
  cDNA Sequence
gccatacactgcttcccttatgtgaagaagcgcatccctgtcatgtaccagcaccacactgacctgaaccccatcgaggtggccattgacgagatgagtaagaaggtggcggagctccggcagctgtgctcctcggccgaggtggacatgatcaaactgcagctcaaactccagggcagcgtgagtgttcaggtcaatgctggcccactagcatatgcgcgagctttcttagatgatacaaacacaaagcgatatcctgacaataaagtgaagctgcttaaggaagttttcaggcaatttgtggaagcttgcggtcaagccttagcggtaaacgaacgtctgattaaagaagaccagctcgagtatcaggaagaaatgaaagccaactacagggaaatggcgaaggagctttctgaaatcatgcatgagcagatctgccccctggaggagaagacgagcgtcttaccgaattcccttcacatcttcaacgccatcagtgggactccaacaagcacaatggttcacgggatgaccagctcgtcttcggtcgtgtgattacatctcatggcccgtgtgtggggacttgctttgtcatttgcaaactcaggatgctttccaaagccaatcactggggagaccgagcacagggaggaccaaggggaaggggagagaaaggaaataaagaacaacgttatttcttaacagactttctataggagttgtaagaaggtgcacatatttttttaaatctcactggcaatattcaaagttttcattgtgtcttaacaaaggtgtggtagacactcttgagctggacttagattttattcttccttgcagagtagtgttagaatagatggcctacagaaaaaaaaggttctgggatctacatggcagggagggctgcactgacattgatgcctgggggaccttttgcctcgaggctgagctggaaaatcttgaaaatattttttttttcctgtggcacattcaggttgaatacaagaactatttttgtgactagtttttgatgacctaagggaactgaccattgtaatttttgtaccagtgaaccaggagatttagtgcttttatattcatttccttgcatttaagaaaatatgaaagcttaaggaattatgtgagcttaaaactagtcaagcagtttagaaccaaaggcctatattaataaccgc

SEQ ID NO: 2643 - DNA, 909 bp, Artificial
  cDNA Sequence
ttccaggcaatttgtggaagcttgcggtcaagccttagcggtaaacgaacgtctgattaaagaagaccagctcgagtatcaggaagaaatgaaagccaactacagggaaatggcgaaggagctttctgaaatcatgcatgagcagatctgccccctggaggagaagacgagcgtcttaccgaattcccttcacatcttcaacgccatcagtgggactccaacaagcacaatggttcacgggatgaccagctcgtcttcggtcgtgtgattacatctcatggcccgtgtgtggggacttgctttgtcatttgcaaactcaggatgctttccaaagccaatcactggggagaccgagcacagggaggaccaaggggaaggggagagaaaggaaataaagaacaacgttatttcttaacagactttctataggagttgtaagaaggtgcacatatttttttaaatctcactggcaatattcaaagttttcattgtgtcttaacaaaggtgtggtagacactcttgagctggacttagattttattcttccttgcagagtagtgttagaatagatggcctacagaaaaaaaaggttctgggatctacatggcagggagggctgcactgacattgatgcctgggggaccttttgcctcgaggctgagctggaaaatcttgaaaatattttttttttcctgtggcacattcaggttgaatacaagaactatttttgtgactagtttttgatgacctaagggaactgaccattgtaatttttgtaccagtgaaccaggagatttagtgcttttatattcatttccttgcatttaagaaaatatgaaagcttaaggaattatgtgagcttaaaactagtcaagcagtttagaaccaaaggcctatattaataaccgc

SEQ ID NO: 2644 - DNA, 978 bp, Artificial
  cDNA Sequence
aagagaccaaaggccaatgagctaccgcagccaccagtcccggaacccgccaatgctgggaagcggaaagtgagggagttcaacttcgagaaatggaatgctcgcatcactgatctacgtaaacaagttgaagaattgtttgaaaggaaatatgctcaagccataaaagccaaaggtccggtgacgatcccgtaccctcttttctagtctcatgttgaagatctttatgtagaaggacttcctgaaggaattccttttagaaggccatctacttacggaattcctcgcctggagaggatattacttgcaaaggaaaggattcgttttgtgattaagaaacatgagcttctgagttcaacacgtgaagatttacagcttgataagccagcttcaggagtaaaggaagaatggtatgccagaatcactaaattaagaaagatggtggatcagcttttctgcaaaaaatttgcggaagccttggggagcactgaagccaaggctgtaccgtaccaaaaatttgaggcacacccgaatgatctgtacgtggaaggactgccagaaaacattcctttccgaagtccctcatggtatggaatcccaaggctggaaaaaatcattcaagtgggcaatcgaattaaatttgttattaaaagaccagaacttctgactcacagtaccactgaagttactcagccaagaacgaatacaccaggttaacctcagcatgcttttgatttggtcaagcaatcaaagtactggtgaagaattgaagattggaagtgacacattttttgctcagggaagtaatggagaaagaaaaatcttcctggaggtagatcttcagtttggattagtctgaacatgatgaaacctgtagaaaccttcatttctcaagacaaagctcaaattcaaggttgtgaggaatgcagtcaccacttttgttaggggcagttgtgacagtgagtgactgcaaaaact

SEQ ID NO: 2645 - DNA, 1470 bp, Artificial
  cDNA Sequence
taccaagctacggaagcaagtggaagagatttttaatttgaaatttgctcaagctcttggactcaccgaggcagtaaaagtaccatatcctgtgtttgaatcaaacccggagttcttgtatgtggaaggcttgccagaggggattcccttccgaagccctacctggtttggaattccacgacttgaaaggatcgtccacgggagtaataaaatcaagttcgttgttaaaaaacctgaactagttatttcctacttgcctcctgggatggctagtaaaataaacactaaagctttgcagtcccccaaaagaccacgaagtcctgggagtaattcaaaggttcctgaaattgaggtcaccgtggaaggccctaataacaacaatcctcaaacctcagctgttcgaaccccgacccagactaacggttctaacgttcccttcaagccacgagggagagagttttcctttgaggcctggaatgccaaaatcacggacctaaaacagaaagttgaaaatctcttcaatgagaaatgtggggaagctcttggccttaaacaagctgtgaaggtgccgttcgcgttatttgagtctttcccggaagacttttatgtggaaggcttacctgagggtgtgccattccgaagaccatcgacttttggcattccgaggctggagaagatactcagaaacaaagccaaaattaagttcatcattaaaaagcccgaaatgtttgagacggcgattaaggagagcacctcctctaagagccctcccagaaaaataaattcatcacccaatgttaatactactgcatcaggtgttgaagaccttaacatcattcaggtgacaattccagatgatgataatgaaagactctcgaaagttgaaaaagctagacagctaagagaacaagtgaatgacctctttagtcggaaatttggtgaagctattggtatgggttttcctgtgaaagttccctacaggaaaatcacaattaaccctggctgtgtggtggttgatggcatgcccccgggggtgtccttcaaagcccccagctacctggaaatcagctccatgagaaggatcttagactctgccgagtttatcaaattcacggtcattagaccatttccaggacttgtgattaataaccagctggttgatcagagtgagtcaaaaggccccgtgatacaagaatcagctgaaccaagccagttggaagttccagccacagaagaaataaaagagactgatggaagctctcagatcaagcaagaaccagaccccacgtggtagacctcttccctcctaggcttaaagtatcagtggttgagaagagcttttcggacctgttactaccccaagctgtagccttgagttacggtgtttattttccaatcaagtgaagatatctcctacttctcctactggaacatctcagcttctgcagtgaagaaaaattcctgtgatag

SEQ ID NO: 2646 - DNA, 1680 bp, Artificial
  cDNA Sequence
taccaagctacggaagcaagtggaagagatttttaatttgaaatttgctcaagctcttggactcaccgaggcagtaaaagtaccatatcctgtgtttgaatcaaacccggagttcttgtatgtggaaggcttgccagaggggattcccttccgaagccctacctggtttggaattccacgacttgaaaggatcgtccacgggagtaataaaatcaagttcgttgttaaaaaacctgaactagttatttcctacttgcctcctgggatggctagtaaaataaacactaaagctttgcagtcccccaaaagaccacgaagtcctgggagtaattcaaaggttcctgaaattgaggtcaccgtggaaggccctaataacaacaatcctcaaacctcagctgttcgaaccccgacccagactaacggttctaacgttcccttcaagccacgagggagagagttttcctttgaggcctggaatgccaaaatcacggacctaaaacagaaagttgaaaatctcttcaatgagaaatgtggggaagctcttggccttaaacaagctgtgaaggtgccgttcgcgttatttgagtctttcccggaagacttttatgtggaaggcttacctgagggtgtgccattccgaagaccatcgacttttggcattccgaggctggagaagatactcagaaacaaagccaaaattaagttcatcattaaaaagcccgaaatgtttgagacggcgattaaggagagcacctcctctaagagccctcccagaaaaataaattcatcacccaatgttaatactactgcatcaggtgttgaagaccttaacatcattcaggtgacaattccagatgatgataatgaaagactctcgaaagttgaaaaagctagacagctaagagaacaagtgaatgacctctttagtcggaaatttggtgaagctattggtatgggttttcctgtgaaagttccctacaggaaaatcacaattaaccctggctgtgtggtggttgatggcatgcccccgggggtgtccttcaaagcccccagctacctggaaatcagctccatgagaaggatcttagactctgccgagtttatcaaattcacggtcattagaccatttccaggacttgtgattaataaccagctggttgatcagagtgagtcaaaaggccccgtgatacaagaatcagctgaaccaagccagttggaagttccagccacagaagaaataaaagagactgatggaagctctcagatcaagcaagaaccagaccccacgtggtagacctcttccctcctagggtaaatcagcttctgtgtcagggatgctgtgtggcgtccatctgaaccccctgcatacgcgtagctaatgtgatctccccactttcacataagatggtggccctgccttcagggaatgtgggagccaggtgggagccttcccggatatttaagctagaagattctacagggagattctccttggatcaatatatgtctctcagtcaaagatgtaaaagcacttttgccttaaaaagaatgttctgtttctaaatagagtcaacgttgtcctcctcattggaattcactatgagtcagaatcattagactgacttttttttttccatagtaatagtattttgcagagtctcacagagctgcagatctttt

SEQ ID NO: 2647 - DNA, 1152 bp, Artificial; identical to SEQ ID NO: 2272
  cDNA Sequence

SEQ ID NO: 2648 - DNA, 1701 bp, Artificial
  cDNA Sequence
gctcaagctcttggactcaccgaggcagtaaaagtaccatatcctgtgtttgaatcaaacccggagttcttgtatgtggaaggcttgccagaggggattcccttccgaagccctacctggtttggaattccacgacttgaaaggatcgtccacgggagtaataaaatcaagttcgttgttaaaaaacctgaactagttatttcctacttgcctcctgggatggctagtaaaataaacactaaagctttgcagtcccccaaaagaccacgaagtcctgggagtaattcaaaggttcctgaaattgaggtcaccgtggaaggccctaataacaacaatcctcaaacctcagctgttcgaaccccgacccagactaacggttctaacgttcccttcaagccacgagggagagagttttcctttgaggcctggaatgccaaaatcacggacctaaaacagaaagttgaaaatctcttcaatgagaaatgtggggaagctcttggccttaaacaagctgtgaaggtgccgttcgcgttatttgagtctttcccggaagacttttatgtggaaggcttacctgagggtgtgccattccgaagaccatcgacttttggcattccgaggctggagaagatactcagaaacaaagccaaaattaagttcatcattaaaaagcccgaaatgtttgagacggcgattaaggagagcacctcctctaagagccctcccagaaaaataaattcatcacccaatgttaatactactgcatcaggtgttgaagaccttaacatcattcaggtgacaattccagatgatgataatgaaagactctcgaaagttgaaaaagctagacagctaagagaacaagtgaatgacctctttagtcggaaatttggtgaagctattggtatgggttttcctgtgaaagttccctacaggaaaatcacaattaaccctggctgtgtggtggttgatggcatgcccccgggggtgtccttcaaagcccccagctacctggaaatcagctccatgagaaggatcttagactctgccgagtttatcaaattcacggtcattagaccatttccaggacttgtgattaataaccagctggttgatcagagtgagtcaaaaggccccgtgatacaagaatcagctgaaccaagccagttggaagttccagccacagaagaaataaaagagactgatggaagctctcagatcaagcaagaaccagaccccacgtggtagacctcttccctcctaggcttaaagtatcagtggttgagaagagcttttcggacctgttactaccccaagctgtgtaatatacttgtataacagaaataccttctatacaaacctttttttctacttttagatagaaatgtctactttttcagcagttctgtgaattaaagagcagagtgactgtgggtctggaatggctggtgtacttgggaatgtactatcaggattttacagcaatgctgggaaatgacagggaaaatgacaggaatgaatctcaccagattttttatgtactcagcagagccttgagttacggtgtttattttccaatcaagtgaagatatctcctacttctcctactggaacatctcagcttctgcagtgaagaaaaattcctgtgatagttcagttctttagtttttctatttgaaaaaaaaaaatcatttaaatgat

SEQ ID NO: 2649 - DNA, 1416 bp, Artificial
  cDNA Sequence
gctcaagctcttggactcaccgaggcagtaaaagtaccatatcctgtgtttgaatcaaacccggagttcttgtatgtggaaggcttgccagaggggattcccttccgaagccctacctggtttggaattccacgacttgaaaggatcgtccacgggagtaataaaatcaagttcgttgttaaaaaacctgaactagttatttcctacttgcctcctgggatggctagtaaaataaacactaaagctttgcagtcccccaaaagaccacgaagtcctgggagtaattcaaaggttcctgaaattgaggtcaccgtggaaggccctaataacaacaatcctcaaacctcagctgttcgaaccccgacccagactaacggttctaacgttcccttcaagccacgagggagagagttttcctttgaggcctggaatgccaaaatcacggacctaaaacagaaagttgaaaatctcttcaatgagaaatgtggggaagctcttggccttaaacaagctgtgaaggtgccgttcgcgttatttgagtctttcccggaagacttttatgtggaaggcttacctgagggtgtgccattccgaagaccatcgacttttggcattccgaggctggagaagatactcagaaacaaagccaaaattaagttcatcattaaaaagcccgaaatgtttgagacggcgattaaggagagcacctcctctaagagccctcccagaaaaataaattcatcacccaatgttaatactactgcatcaggtgttgaagaccttaacatcattcaggtgacaattccagatgatgataatgaaagactctcgaaagttgaaaaagctagacagctaagagaacaagtgaatgacctctttagtcggaaatttggtgaagctattggtatgggttttcctgtgaaagttccctacaggaaaatcacaattaaccctggctgtgtggtggttgatggcatgcccccgggggtgtccttcaaagcccccagctacctggaaatcagctccatgagaaggatcttagactctgccgagtttatcaaattcacggtcattagaccatttccaggacttgtgattaataaccagctggttgatcagagtgagtcaaaaggccccgtgatacaagaatcagctgaaccaagccagttggaagttccagccacagaagaaataaaagagactgatggaagctctcagatcaagcaagaaccagaccccacgtggtagacctcttccctcctaggagccttgagttacggtgtttattttccaatcaagtgaagatatctcctacttctcctactggaacatctcagcttctgcagtgaagaaaaattcctgtgatagttcagttctttagtttttctatttgaaaaaaaaaaatcatttaaatga

SEQ ID NO: 2650 - DNA, 1424 bp, Artificial
  cDNA Sequence
gctcaagctcttggactcaccgaggcagtaaaagtaccatatcctgtgtttgaatcaaacccggagttcttgtatgtggaaggcttgccagaggggattcccttccgaagccctacctggtttggaattccacgacttgaaaggatcgtccacgggagtaataaaatcaagttcgttgttaaaaaacctgaactagttatttcctacttgcctcctgggatggctagtaaaataaacactaaagctttgcagtcccccaaaagaccacgaagtcctgggagtaattcaaaggttcctgaaattgaggtcaccgtggaaggccctaataacaacaatcctcaaacctcagctgttcgaaccccgacccagactaacggttctaacgttcccttcaagccacgagggagagagttttcctttgaggcctggaatgccaaaatcacggacctaaaacagaaagttgaaaatctcttcaatgagaaatgtggggaagctcttggccttaaacaagctgtgaaggtgccgttcgcgttatttgagtctttcccggaagacttttatgtggaaggcttacctgagggtgtgccattccgaagaccatcgacttttggcattccgaggctggagaagatactcagaaacaaagccaaaattaagttcatcattaaaaagcccgaaatgtttgagacggcgattaaggagagcacctcctctaagagccctcccagaaaaataaattcatcacccaatgttaatactactgcatcaggtgttgaagaccttaacatcattcaggtgacaattccagatgatgataatgaaagactctcgaaagttgaaaaagctagacagctaagagaacaagtgaatgacctctttagtcggaaatttggtgaagctattggtatgggttttcctgtgaaagttccctacaggaaaatcacaattaaccctggctgtgtggtggttgatggcatgcccccgggggtgtccttcaaagcccccagctacctggaaatcagctccatgagaaggatcttagactctgccgagtttatcaaattcacggtcattagaccatttccaggacttgtgattaataaccagctggttgatcagagtgagtcaaaaggccccgtgatacaagaatcagctgaaccaagccagttggaagttccagccacagaagaaataaaagagactgatggaagctctcagatcaagcaagaaccagaccccacgtggtagacctcttccctcctaggcttaaagtatcagtggttgagaagagcttttcggacctgttactaccccaagctgtagccttgagttacggtgtttattttccaatcaagtgaagatatctcctacttctcctactggaacatctcagcttctgcagtgaagaaaaattcctgtgatag

SEQ ID NO: 2651 - DNA, 1634 bp, Artificial
  cDNA Sequence
gctcaagctcttggactcaccgaggcagtaaaagtaccatatcctgtgtttgaatcaaacccggagttcttgtatgtggaaggcttgccagaggggattcccttccgaagccctacctggtttggaattccacgacttgaaaggatcgtccacgggagtaataaaatcaagttcgttgttaaaaaacctgaactagttatttcctacttgcctcctgggatggctagtaaaataaacactaaagctttgcagtcccccaaaagaccacgaagtcctgggagtaattcaaaggttcctgaaattgaggtcaccgtggaaggccctaataacaacaatcctcaaacctcagctgttcgaaccccgacccagactaacggttctaacgttcccttcaagccacgagggagagagttttcctttgaggcctggaatgccaaaatcacggacctaaaacagaaagttgaaaatctcttcaatgagaaatgtggggaagctcttggccttaaacaagctgtgaaggtgccgttcgcgttatttgagtctttcccggaagacttttatgtggaaggcttacctgagggtgtgccattccgaagaccatcgacttttggcattccgaggctggagaagatactcagaaacaaagccaaaattaagttcatcattaaaaagcccgaaatgtttgagacggcgattaaggagagcacctcctctaagagccctcccagaaaaataaattcatcacccaatgttaatactactgcatcaggtgttgaagaccttaacatcattcaggtgacaattccagatgatgataatgaaagactctcgaaagttgaaaaagctagacagctaagagaacaagtgaatgacctctttagtcggaaatttggtgaagctattggtatgggttttcctgtgaaagttccctacaggaaaatcacaattaaccctggctgtgtggtggttgatggcatgcccccgggggtgtccttcaaagcccccagctacctggaaatcagctccatgagaaggatcttagactctgccgagtttatcaaattcacggtcattagaccatttccaggacttgtgattaataaccagctggttgatcagagtgagtcaaaaggccccgtgatacaagaatcagctgaaccaagccagttggaagttccagccacagaagaaataaaagagactgatggaagctctcagatcaagcaagaaccagaccccacgtggtagacctcttccctcctagggtaaatcagcttctgtgtcagggatgctgtgtggcgtccatctgaaccccctgcatacgcgtagctaatgtgatctccccactttcacataagatggtggccctgccttcagggaatgtgggagccaggtgggagccttcccggatatttaagctagaagattctacagggagattctccttggatcaatatatgtctctcagtcaaagatgtaaaagcacttttgccttaaaaagaatgttctgtttctaaatagagtcaacgttgtcctcctcattggaattcactatgagtcagaatcattagactgacttttttttttccatagtaatagtattttgcagagtctcacagagctgcagatctttt

SEQ ID NO: 2652 - DNA, 1106 bp, Artificial; identical to SEQ ID NO: 2261
  cDNA Sequence

SEQ ID NO: 2653 - DNA, 1518 bp, Artificial
  cDNA Sequence
agacctgaactagttatttcctacttgcctcctgggatggctagtaaaataaacactaaagctttgcagtcccccaaaagaccacgaagtcctgggagtaattcaaaggttcctgaaattgaggtcaccgtggaaggccctaataacaacaatcctcaaacctcagctgttcgaaccccgacccagactaacggttctaacgttcccttcaagccacgagggagagagttttcctttgaggcctggaatgccaaaatcacggacctaaaacagaaagttgaaaatctcttcaatgagaaatgtggggaagctcttggccttaaacaagctgtgaaggtgccgttcgcgttatttgagtctttcccggaagacttttatgtggaaggcttacctgagggtgtgccattccgaagaccatcgacttttggcattccgaggctggagaagatactcagaaacaaagccaaaattaagttcatcattaaaaagcccgaaatgtttgagacggcgattaaggagagcacctcctctaagagccctcccagaaaaataaattcatcacccaatgttaatactactgcatcaggtgttgaagaccttaacatcattcaggtgacaattccagatgatgataatgaaagactctcgaaagttgaaaaagctagacagctaagagaacaagtgaatgacctctttagtcggaaatttggtgaagctattggtatgggttttcctgtgaaagttccctacaggaaaatcacaattaaccctggctgtgtggtggttgatggcatgcccccgggggtgtccttcaaagcccccagctacctggaaatcagctccatgagaaggatcttagactctgccgagtttatcaaattcacggtcattagaccatttccaggacttgtgattaataaccagctggttgatcagagtgagtcaaaaggccccgtgatacaagaatcagctgaaccaagccagttggaagttccagccacagaagaaataaaagagactgatggaagctctcagatcaagcaagaaccagaccccacgtggtagacctcttccctcctaggcttaaagtatcagtggttgagaagagcttttcggacctgttactaccccaagctgtgtaatatacttgtataacagaaataccttctatacaaacctttttttctacttttagatagaaatgtctactttttcagcagttctgtgaattaaagagcagagtgactgtgggtctggaatggctggtgtacttgggaatgtactatcaggattttacagcaatgctgggaaatgacagggaaaatgacaggaatgaatctcaccagattttttatgtactcagcagagccttgagttacggtgtttattttccaatcaagtgaagatatctcctacttctcctactggaacatctcagcttctgcagtgaagaaaaattcctgtgatagttcagttctttagtttttctatttgaaaaaaaaaaatcatttaaatgat

SEQ ID NO: 2654 - DNA, 1233 bp, Artificial
  cDNA Sequence
agacctgaactagttatttcctacttgcctcctgggatggctagtaaaataaacactaaagctttgcagtcccccaaaagaccacgaagtcctgggagtaattcaaaggttcctgaaattgaggtcaccgtggaaggccctaataacaacaatcctcaaacctcagctgttcgaaccccgacccagactaacggttctaacgttcccttcaagccacgagggagagagttttcctttgaggcctggaatgccaaaatcacggacctaaaacagaaagttgaaaatctcttcaatgagaaatgtggggaagctcttggccttaaacaagctgtgaaggtgccgttcgcgttatttgagtctttcccggaagacttttatgtggaaggcttacctgagggtgtgccattccgaagaccatcgacttttggcattccgaggctggagaagatactcagaaacaaagccaaaattaagttcatcattaaaaagcccgaaatgtttgagacggcgattaaggagagcacctcctctaagagccctcccagaaaaataaattcatcacccaatgttaatactactgcatcaggtgttgaagaccttaacatcattcaggtgacaattccagatgatgataatgaaagactctcgaaagttgaaaaagctagacagctaagagaacaagtgaatgacctctttagtcggaaatttggtgaagctattggtatgggttttcctgtgaaagttccctacaggaaaatcacaattaaccctggctgtgtggtggttgatggcatgcccccgggggtgtccttcaaagcccccagctacctggaaatcagctccatgagaaggatcttagactctgccgagtttatcaaattcacggtcattagaccatttccaggacttgtgattaataaccagctggttgatcagagtgagtcaaaaggccccgtgatacaagaatcagctgaaccaagccagttggaagttccagccacagaagaaataaaagagactgatggaagctctcagatcaagcaagaaccagaccccacgtggtagacctcttccctcctaggagccttgagttacggtgtttattttccaatcaagtgaagatatctcctacttctcctactggaacatctcagcttctgcagtgaagaaaaattcctgtgatagttcagttctttagtttttctatttgaaaaaaaaaaatcatttaaatga

SEQ ID NO: 2655 - DNA, 1241 bp, Artificial
  cDNA Sequence
agacctgaactagttatttcctacttgcctcctgggatggctagtaaaataaacactaaagctttgcagtcccccaaaagaccacgaagtcctgggagtaattcaaaggttcctgaaattgaggtcaccgtggaaggccctaataacaacaatcctcaaacctcagctgttcgaaccccgacccagactaacggttctaacgttcccttcaagccacgagggagagagttttcctttgaggcctggaatgccaaaatcacggacctaaaacagaaagttgaaaatctcttcaatgagaaatgtggggaagctcttggccttaaacaagctgtgaaggtgccgttcgcgttatttgagtctttcccggaagacttttatgtggaaggcttacctgagggtgtgccattccgaagaccatcgacttttggcattccgaggctggagaagatactcagaaacaaagccaaaattaagttcatcattaaaaagcccgaaatgtttgagacggcgattaaggagagcacctcctctaagagccctcccagaaaaataaattcatcacccaatgttaatactactgcatcaggtgttgaagaccttaacatcattcaggtgacaattccagatgatgataatgaaagactctcgaaagttgaaaaagctagacagctaagagaacaagtgaatgacctctttagtcggaaatttggtgaagctattggtatgggttttcctgtgaaagttccctacaggaaaatcacaattaaccctggctgtgtggtggttgatggcatgcccccgggggtgtccttcaaagcccccagctacctggaaatcagctccatgagaaggatcttagactctgccgagtttatcaaattcacggtcattagaccatttccaggacttgtgattaataaccagctggttgatcagagtgagtcaaaaggccccgtgatacaagaatcagctgaaccaagccagttggaagttccagccacagaagaaataaaagagactgatggaagctctcagatcaagcaagaaccagaccccacgtggtagacctcttccctcctaggcttaaagtatcagtggttgagaagagcttttcggacctgttactaccccaagctgtagccttgagttacggtgtttattttccaatcaagtgaagatatctcctacttctcctactggaacatctcagcttctgcagtgaagaaaaattcctgtgatag

SEQ ID NO: 2656 - DNA, 1451 bp, Artificial
  cDNA Sequence
agacctgaactagttatttcctacttgcctcctgggatggctagtaaaataaacactaaagctttgcagtcccccaaaagaccacgaagtcctgggagtaattcaaaggttcctgaaattgaggtcaccgtggaaggccctaataacaacaatcctcaaacctcagctgttcgaaccccgacccagactaacggttctaacgttcccttcaagccacgagggagagagttttcctttgaggcctggaatgccaaaatcacggacctaaaacagaaagttgaaaatctcttcaatgagaaatgtggggaagctcttggccttaaacaagctgtgaaggtgccgttcgcgttatttgagtctttcccggaagacttttatgtggaaggcttacctgagggtgtgccattccgaagaccatcgacttttggcattccgaggctggagaagatactcagaaacaaagccaaaattaagttcatcattaaaaagcccgaaatgtttgagacggcgattaaggagagcacctcctctaagagccctcccagaaaaataaattcatcacccaatgttaatactactgcatcaggtgttgaagaccttaacatcattcaggtgacaattccagatgatgataatgaaagactctcgaaagttgaaaaagctagacagctaagagaacaagtgaatgacctctttagtcggaaatttggtgaagctattggtatgggttttcctgtgaaagttccctacaggaaaatcacaattaaccctggctgtgtggtggttgatggcatgcccccgggggtgtccttcaaagcccccagctacctggaaatcagctccatgagaaggatcttagactctgccgagtttatcaaattcacggtcattagaccatttccaggacttgtgattaataaccagctggttgatcagagtgagtcaaaaggccccgtgatacaagaatcagctgaaccaagccagttggaagttccagccacagaagaaataaaagagactgatggaagctctcagatcaagcaagaaccagaccccacgtggtagacctcttccctcctagggtaaatcagcttctgtgtcagggatgctgtgtggcgtccatctgaaccccctgcatacgcgtagctaatgtgatctccccactttcacataagatggtggccctgccttcagggaatgtgggagccaggtgggagccttcccggatatttaagctagaagattctacagggagattctccttggatcaatatatgtctctcagtcaaagatgtaaaagcacttttgccttaaaaagaatgttctgtttctaaatagagtcaacgttgtcctcctcattggaattcactatgagtcagaatcattagactgacttttttttttccatagtaatagtattttgcagagtctcacagagctgcagatctttt

SEQ ID NO: 2657 - DNA, 923 bp, Artificial; identical to SEQ ID NO: 2060
  cDNA Sequence

SEQ ID NO: 2658 - DNA, 789 bp, Artificial; identical to SEQ ID NO: 2061
  cDNA Sequence

SEQ ID NO: 2659 - DNA, 632 bp, Artificial
  cDNA Sequence
tctttagaccatttccaggacttgtgattaataaccagctggttgatcagagtgagtcaaaaggccccgtgatacaagaatcagctgaaccaagccagttggaagttccagccacagaagaaataaaagagactgatggaagctctcagatcaagcaagaaccagaccccacgtggtagacctcttccctcctaggcttaaagtatcagtggttgagaagagcttttcggacctgttactaccccaagctgtgtaatatacttgtataacagaaataccttctatacaaacctttttttctacttttagatagaaatgtctactttttcagcagttctgtgaattaaagagcagagtgactgtgggtctggaatggctggtgtacttgggaatgtactatcaggattttacagcaatgctgggaaatgacagggaaaatgacaggaatgaatctcaccagattttttatgtactcagcagagccttgagttacggtgtttattttccaatcaagtgaagatatctcctacttctcctactggaacatctcagcttctgcagtgaagaaaaattcctgtgatagttcagttctttagtttttctatttgaaaaaaaaaaatcatttaaatgat

SEQ ID NO: 2660 - DNA, 644 bp, Artificial
  cDNA Sequence
ggaacaacacatccttacattatttaaaccaatctgcttcattttcagagctggttgatcagagtgagtcaaaaggccccgtgatacaagaatcagctgaaccaagccagttggaagttccagccacagaagaaataaaagagactgatggaagctctcagatcaagcaagaaccagaccccacgtggtagacctcttccctcctaggcttaaagtatcagtggttgagaagagcttttcggacctgttactaccccaagctgtgtaatatacttgtataacagaaataccttctatacaaacctttttttctacttttagatagaaatgtctactttttcagcagttctgtgaattaaagagcagagtgactgtgggtctggaatggctggtgtacttgggaatgtactatcaggattttacagcaatgctgggaaatgacagggaaaatgacaggaatgaatctcaccagattttttatgtactcagcagagccttgagttacggtgtttattttccaatcaagtgaagatatctcctacttctcctactggaacatctcagcttctgcagtgaagaaaaattcctgtgatagttcagttctttagtttttctatttgaaaaaaaaaaatcatttaaatgat

SEQ ID NO: 2661 - DNA, 1747 bp, Artificial
  cDNA Sequence
taccaagctacggaagcaagtggaagagatttttaatttgaaatttgctcaagctcttggactcaccgaggcagtaaaagtaccatatcctgtgtttgaatcaaacccggagttcttgtatgtggaaggcttgccagaggggattcccttccgaagccctacctggtttggaattccacgacttgaaaggatcgtccacgggagtaataaaatcaagttcgttgttaaaaaacctgaactagttatttcctacttgcctcctgggatggctagtaaaataaacactaaagctttgcagtcccccaaaagaccacgaagtcctgggagtaattcaaaggttcctgaaattgaggtcaccgtggaaggccctaataacaacaatcctcaaacctcagctgttcgaaccccgacccagactaacggttctaacgttcccttcaagccacgagggagagagttttcctttgaggcctggaatgccaaaatcacggacctaaaacagaaagttgaaaatctcttcaatgagaaatgtggggaagctcttggccttaaacaagctgtgaaggtgccgttcgcgttatttgagtctttcccggaagacttttatgtggaaggcttacctgagggtgtgccattccgaagaccatcgacttttggcattccgaggctggagaagatactcagaaacaaagccaaaattaagttcatcattaaaaagcccgaaatgtttgagacggcgattaaggagagcacctcctctaagagccctcccagaaaaataaattcatcacccaatgttaatactactgcatcaggtgttgaagaccttaacatcattcaggtgacaattccagatgatgataatgaaagactctcgaaagttgaaaaagctagacagctaagagaacaagtgaatgacctctttagtcggaaatttggtgaagctattggtatgggttttcctgtgaaagttccctacaggaaaatcacaattaaccctggctgtgtggtggttgatggcatgcccccgggggtgtccttcaaagcccccagctacctggaaatcagctccatgagaaggatcttagactctgccgagtttatcaaattcacggtcattagaccatttccaggacttgtgattaataaccagctggttgatcagagtgagtcaaaaggccccgtgatacaagaatcagctgaaccaagccagttggaagttccagccacagaagaaataaaagagactgatggaagctctcagatcaagcaagaaccagaccccacgtggtagacctcttccctcctaggcttaaagtatcagtggttgagaagagcttttcggacctgttactaccccaagctgtgtaatatacttgtataacagaaataccttctatacaaacctttttttctacttttagatagaaatgtctactttttcagcagttctgtgaattaaagagcagagtgactgtgggtctggaatggctggtgtacttgggaatgtactatcaggattttacagcaatgctgggaaatgacagggaaaatgacaggaatgaatctcaccagattttttatgtactcagcagagccttgagttacggtgtttattttccaatcaagtgaagatatctcctacttctcctactggaacatctcagcttctgcagtgaagaaaaattcctgtgatagttcagttctttagtttttctatttgaaaaaaaaaaatcatttaaatgat

SEQ ID NO: 2662 - DNA, 1462 bp, Artificial
  cDNA Sequence
taccaagctacggaagcaagtggaagagatttttaatttgaaatttgctcaagctcttggactcaccgaggcagtaaaagtaccatatcctgtgtttgaatcaaacccggagttcttgtatgtggaaggcttgccagaggggattcccttccgaagccctacctggtttggaattccacgacttgaaaggatcgtccacgggagtaataaaatcaagttcgttgttaaaaaacctgaactagttatttcctacttgcctcctgggatggctagtaaaataaacactaaagctttgcagtcccccaaaagaccacgaagtcctgggagtaattcaaaggttcctgaaattgaggtcaccgtggaaggccctaataacaacaatcctcaaacctcagctgttcgaaccccgacccagactaacggttctaacgttcccttcaagccacgagggagagagttttcctttgaggcctggaatgccaaaatcacggacctaaaacagaaagttgaaaatctcttcaatgagaaatgtggggaagctcttggccttaaacaagctgtgaaggtgccgttcgcgttatttgagtctttcccggaagacttttatgtggaaggcttacctgagggtgtgccattccgaagaccatcgacttttggcattccgaggctggagaagatactcagaaacaaagccaaaattaagttcatcattaaaaagcccgaaatgtttgagacggcgattaaggagagcacctcctctaagagccctcccagaaaaataaattcatcacccaatgttaatactactgcatcaggtgttgaagaccttaacatcattcaggtgacaattccagatgatgataatgaaagactctcgaaagttgaaaaagctagacagctaagagaacaagtgaatgacctctttagtcggaaatttggtgaagctattggtatgggttttcctgtgaaagttccctacaggaaaatcacaattaaccctggctgtgtggtggttgatggcatgcccccgggggtgtccttcaaagcccccagctacctggaaatcagctccatgagaaggatcttagactctgccgagtttatcaaattcacggtcattagaccatttccaggacttgtgattaataaccagctggttgatcagagtgagtcaaaaggccccgtgatacaagaatcagctgaaccaagccagttggaagttccagccacagaagaaataaaagagactgatggaagctctcagatcaagcaagaaccagaccccacgtggtagacctcttccctcctaggagccttgagttacggtgtttattttccaatcaagtgaagatatctcctacttctcctactggaacatctcagcttctgcagtgaagaaaaattcctgtgatagttcagttctttagtttttctatttgaaaaaaaaaaatcatttaaatga

SEQ ID NO: 2663 - DNA, 1339 bp, Artificial
  cDNA Sequence
catttaaggcgcagcctggaagtgccagggagcactggaggccacccagtcatgggggacaccttcatccgtcacatcgccctgctgggctttgagaagcgcttcgtacccagccagcactatgtgagtacatgttcctggtgaaatggcaggacctgtcggagaaggtggtctaccggcgcttcaccgagatctacgagttccataaaaccttaaaagaaatgttccctattgaggcaggggcgatcaatccagagaacaggatcatcccccacctcccagctcccaagtggtttgacgggcagcgggccgccgagaaccaccagggcacacttaccgagtactgcggcacgctcatgagcctgcccaccaagatctcccgctgtccccacctccttgacttcttcaaggtgcgccctgatgacctcaagctccccacggacaaccagacaaaaaagccagagacatacttgatgcccaaagatggcaagagtaccgcgacagacatcaccggccccatcatcctgcagacgtaccgcgccattgccaactacgagaagacctcgggctccgagatggctctgtccacgggggacgtggtggaggtcgtggagaagagcgagagcggttggtggttctgtcagatgaaagcaaagcgaggctggatcccagcatccttcctcgagcccctggacagtcctgacgagacggaagaccctgagcccaactatgcaggtgagccatacgtcgccatcaaggcctacactgctgtggagggggacgaggtgtccctgctcgagggtgaagctgttgaggtaattcacaagctcctggacggctggtgggtcatcaggaaagacgacgtcacaggctacttcccgtccatgtacctgcaaaagtcagggcaagacgtgtcccaggcccaacgccagatcaagcggggggcgccgccccgcaggtcgtccatccgcaacgtgcacagcatccaccagcggtcgcggaagcgcctcagccaggacgcctatcgccgcaacagcgtccgttttctgcagcagcgacgccgccaggcgcggccgggaccgcagagccccgggagcccgctcgaggaggagcggcagacgcagcgctctaaaccgcagccggcggtgcccccgcggccgagcgccgacctcatcctgaaccgctgcagcgagagcaccaagcggaagctggcgtctgccgtctgaggctggagcgcagtccccagctagcgtctcggcccttgccgccccgtgcctgtatatacgtgttctatagagcctggcgtctggacgccgagggcagccccgacccctgtcca

SEQ ID NO: 2664 - DNA, 1339 bp, Artificial; identical to SEQ ID NO: 2663
  cDNA Sequence

SEQ ID NO: 2665 - DNA, 1183 bp, Artificial
  cDNA Sequence
catttaaggcgcagcctggaagtgccagggagcactggaggccacccagtcatgggggacaccttcatccgtcacatcgccctgctgggctttgagaagcgcttcgtacccagccagcactatgtgagtacatgttcctggtgaaatggcaggacctgtcggagaaggtggtctaccggcgcttcaccgagatctacgagttccataaaaccttaaaagaaatgttccctattgaggcaggggcgatcaatccagagaacaggatcatcccccacctcccagctcccaagtggtttgacgggcagcgggccgccgagaaccaccagggcacacttaccgagtactgcggcacgctcatgagcctgcccaccaagatctcccgctgtccccacctccttgacttcttcaaggtgcgccctgatgacctcaagctccccacggacaaccagacaaaaaagccagagacatacttgatgcccaaagatggcaagagtaccgcgacagacatcaccggccccatcatcctgcagacgtaccgcgccattgccaactacgagaagacctcgggctccgagatggctctgtccacgggggacgtggtggaggtcgtggagaagagcgagagcggtcagacctcccaccttacggggctccttcccctggtgctcaggaacccacagccacaagccccctgccaaggctcaggcagcctggcccctgggaggactccggctctgttaggggccctaaatgtcctccccacactgtgggtcgccttctctcttagtgtgcaccctgtggtggctgtgggcatctgtgcatggcaggccggggcggggcatgtctgcgtgttctgtctggatgggtatgggaccgtctgttcattatgaagtgggctcagagctgtgattctgtgagcatgtgtgcatgcatgcatgtgacctcattgtccagtgtggtgaaggtgacatttccaaatctgagcattggacatcagtgtgtctgtgtccctgtgtcctcaccatccctgatggctgcagggagccgctgggccctgcccctcagtcacattcccgcacctctggcacaggttggtggttctgtcagatgaaagcaaagcgaggctggatcccagcatccttcctcgagcccctggacagtcctgacgagacggaagaccctg

SEQ ID NO: 2666 - DNA, 585 bp, Artificial
  cDNA Sequence
cccagtcatgggggacaccttcatccgtcacatcgccctgctgggctttgagaagcgcttcgtacccagccagcactatgtacatgttcctggtgaaatggcaggacctgtcggagaaggtggtctaccggcgcttcaccgagatctacgagttccatgacaaaaaagccagagacatacttgatgcccaaagatggcaagagtaccgcgacagacatcaccggccccatcatcctgcagacgtaccgcgccattgccaactacgagaagacctcgggctccgagatggctctgtccacgggggacgtggtggaggtcgtggagaagagcgagagcggtcagacctcccaccttacggggctccttcccctggtgctcaggaacccacagccacaagccccctgccaaggctcaggcagcctggcccctgggaggactccggctctgttaggggccctaaatgtcctccccacactgtgggtcgccttctctcttagtgtgcaccctgtggtggctgtgggcatctgtgcatggcaggccggggcggggcatgtctgcgtgttctgtctggatgggtatgggacc

SEQ ID NO: 2667 - DNA, 551 bp, Artificial
  cDNA Sequence
tgctcgagggtgaagctgttgaggaaagacgacgtcacaggctacttcccgtccatgtacctgcaaaagtcagggcaagacgtgtcccaggcccaacgccagatcaagcggggggcgccgccccgcaggtcgtccatccgcaacgtgcacagcatccaccagcggtcgcggaagcgcctcagccaggacgcctatcgccgcaacagcgtccgttttctgcagcagcgacgccgccaggcgcggccgggaccgcagagccccgggagcccgctcgaggaggagcggcagacgcagcgctctaaaccgcagccggcggtgcccccgcggccgagcgccgacctcatcctgaaccgctgcagcgagagcaccaagcggaagctggcgtctgccgtctgaggctggagcgcagtccccagctagcgtctcggcccttgccgccccgtgcctgtatatacgtgttctatagagcctggcgtctggacgccgagggcagccccgacccctgtccagcgcggctcccgccaccctcaataaatgttgcttggagtgga

SEQ ID NO: 2668 - DNA, 674 bp, Artificial
  cDNA Sequence
acaagctcctggacggctggtgggtcatcagcaaatacctgtcccctgcggtgacctggatctgctaacctccacccctgcctagactgtggaaggattgctggaagggtctcagttgcacagaccaggaaactgaggcccacagaggcagacgacgtcacaggctacttcccgtccatgtacctgcaaaagtcagggcaagacgtgtcccaggcccaacgccagatcaagcggggggcgccgccccgcaggtcgtccatccgcaacgtgcacagcatccaccagcggtcgcggaagcgcctcagccaggacgcctatcgccgcaacagcgtccgttttctgcagcagcgacgccgccaggcgcggccgggaccgcagagccccgggagcccgctcgaggaggagcggcagacgcagcgctctaaaccgcagccggcggtgcccccgcggccgagcgccgacctcatcctgaaccgctgcagcgagagcaccaagcggaagctggcgtctgccgtctgaggctggagcgcagtccccagctagcgtctcggcccttgccgccccgtgcctgtatatacgtgttctatagagcctggcgtctggacgccgagggcagccccgacccctgtccagcgcggctcccgccaccctcaataaatgttgcttggagtgga

SEQ ID NO: 2669 - DNA, 1024 bp, Artificial
  cDNA Sequence
ttgagctgcttgacttcctggactgtgctgagtcagacaagttttgtgctctctcagctgagcagcaagaccaatttccacttcagaaggtcctgaaagtggcagctacggaacgggagtttggcaactaccttttccgccagaatcgtttctatgatgccaaagtgagatataaaagggccctgttgcttctgcgccggcgatcagcaccccctgaagagcagcacctggtggaggccgccaagcttcctgttctcctgaacctgtcctttacatacctgaagctagaccgacccaccatagccctgtgctatggagagcaggctttgatcattgaccaaaagaatgccaaggccctcttcaggtgtggacaggcttgtcttctcctgactgagtatcaaaaggcccgggattttctagttcgagcccagaaggagcaacccttcaatcatgacatcaataatgagctgaagaaactggctagctgttacagggactatgtggataaagagaaagaaatgtggcaccgcatgttcgcgccctgtggcgatggttctacagcaggagaaagttgaaggttcttcacctaccaacgaggggagagagctgtggttctccatcattgggggagtggaagggagctcccagcgcagccgtggcagccaccttccaggagcaggggctggaatgtcctgtggccgcatctctcatggacgcggctgaaacgtgttttcacaggtgctgttttctgttttccgtgttcgtaacagaagggaggggaaagcgcagctactgacaagtagaacactgctactttttttaaggcagtttcttgtttttttagacggaattagtccttggcttccctcccagtcccagccctgcttccggctgcgaatgtccctgagtcaacaccaatagagattgctttgtgtattttgtagggttctctgttttgaagacagaattatgttacaaatgtttttgttgtaaataaataaaacacttccttgtccttgcaaga

SEQ ID NO: 2670 - DNA, 913 bp, Artificial
  cDNA Sequence
ttgagctgcttgacttcctggactgtgctgagtcagacaagttttgtgctctctcagctgagcagcaagaccaatttccacttcagaaggtcctgaaagtggcagctacggaacgggagtttggcaactaccttttccgccagaatcgtttctatgatgccaaagtgagatataaaagggccctgttgcttctgcgccggcgatcagcaccccctgaagagcagcacctggtggaggccgccaagcttcctgttctcctgaacctgtcctttacatacctgaagctagaccgacccaccatagccctgtgctatggagagcaggctttgatcattgaccaaaagaatgccaaggccctcttcaggtgtggacaggcttgtcttctcctgactgagtatcaaaaggcccgggattttctagttcgagcccagaaggagcaacccttcaatcatgacatcaataatgagctgaagaaactggctagctgttacagggactatgtggataaagagaaagaaatgtggcaccgcatgttcgcgccctgtggcgatggttctacagcaggagaaagttgaaggttcttcacctaccaacgaggggagagagctgtggttctccatcattgggggagtggaagggagctcccagcgcagccgtggcagccaccttccaggagcaggggctggaatgtcctgtggccgcatctctcatggacgcggctgaaacgtgttttcacagacggaattagtccttggcttccctcccagtcccagccctgcttccggctgcgaatgtccctgagtcaacaccaatagagattgctttgtgtattttgtagggttctctgttttgaagacagaattatgttacaaatgtttttgttgtaaataaataaaacacttccttgtccttg

SEQ ID NO: 2671 - DNA, 487 bp, Artificial
  cDNA Sequence
ctgaaagtggcagctacggaacgggagtttggcaactaccttttccgccagaatcgtttctatgatgccaaagtgagatataaaagggccctgttgcttctgcgccggcgatcagcaccccctgaagagcagcacctggtggaggccgccaagcttcctgttctcctgaacctgtcctttacatacctgaagctagaccgacccaccatagccctgtgctatggagagcaggctttgatcattgaccaaaagaatgccaaggccctcttcaggtgtggacaggcttgtcttctcctgactgagtatcaaaaggcccgggattttctagttcgagcccagaaggagcaacccttcaatcatgacatcaataatgagctgaagaaactggctagctgttacagggactatgtggataaagagaaagaaatgtggcaccgcatgttcgcgccctgtggcgatggttctacagcaggagaaagttgaaggt

SEQ ID NO: 2672 - DNA, 668 bp, Artificial
  cDNA Sequence
ggagcggatcctggagccggagcggagcggagcggagcggagccggggcggagcgggccgagcgggccgagccagcagccgagctgggggcgcgggcgggcggcatgtaccgggcccgggcggcgcgggcggggccggagcccggcagcccggggcgctttgggatcctcagcaccgggcagctccgggacctgcttcaggatgagcccaagctggaccggatcgtgcggctcagcaggaagttccagggcctgcagctggagcgtgaggcctgcctggcctccaactacgcgctggccaaggagaacctggccctgcggccccgcctggagatgggccgggctgccctggccatcaaataccaggagcttcgtgaggtggccgagaactgcgcggacaagctgcagcgactgggtgagggcaccatgcatcgctggagtccccactgcgcgctgggctggctgcaggctgagctagaagaggcggagcaggaggcagaggagcagatggagcagctgctgctcggggagcaaagcctggaggccttcctgcctgccttccagcgtggccgcgccctggcccacctgaggcggacgcaggcagagaagctgcaggagctgctgcggcgtcgggagcgttctgcccagccggcccccacctcggctgct

SEQ ID NO: 2673 - DNA, 1238 bp, Artificial
  cDNA Sequence
gcaggtgtgctgctgaggcgtgagaatggcgtcccgcggccggcgtccggagcatggcggacccccagagctgttttatgacgagacagaagcccggaaatacgttcgcaagtgaggggagcctgaatactgcggggcgtccgggggtcgggaagcggcaagttgcccctgttgctggcgttgcccggaaaggccgtagaatttggggctcacggatgattgatatccagaccaggatggctgggcgagcattggagcttctttatctgccagagaataagccctgttacctgctggatattggctgtggcactgggctgagtggaagttatctgtcagatgaagggcactattgggtgggcctggatatcagccctgccatgctggatgaggctgtggaccgagagatagagggagacctgctgctgggggatatgggccagggcatcccattcaagccaggcacatttgatggttgcatcagcatttctgctgtgcagtggctctgtaatgctaacaagaagtctgaaaaccctgccaagcgcctgtactgcttttttgcttctcttttttctgttctcgtccggggatcccgagctgtcctgcagctgtaccctgagaactcagagcagttggagctgatcacaacccaggccacaaaggcaggcttctccggtggcatggtggtagactaccctaacagtgccaaagcaaagaaattctacctctgcttgttttctgggccttcgacctttataccagaggggctgagtgaaaatcaggatgaagttgaacccagggagtctgtgttcaccaatgagaggttcccattaaggatgtcgaggcggggaatggtgaggaagagtcgggcatgggtgctggagaagaaggagcggcacaggcgccagggcagggaagtcagacctgacacccagtacaccggccgcaagcgcaagccccgcttctaagtcaccacgcggttctggaaaggcacttgcctctgcacttttctatattgttcagctgacaaagtagtattttagaaaagttctaaagttataaaaatgttttctgcagtaaaaaaaaagttctctgggccgggcgtggtggctcacacctgtaatcccagcaccttgggaggctgaggtgggaggatcatttgaggccaggagtttgagacctgcctgggcaacataatgaaacttcctttccagggaggaaaaaaaaaaaaaaaaaaa

SEQ ID NO: 2674 - DNA, 1199 bp, Artificial
  cDNA Sequence
ggcgtcccgcggccggcgtccggagcatggcggacccccagagctgttttatgacgagacagaagcccggaaatacgttcgcaagtgaggggagcctgaatactgcggggcgtccgggggtcgggaagcggcaagttgcccctgttgctggcgttgcccggaaaggccgtagaatttggggctcacggatgattgatatccagaccaggatggctgggcgagcattggagcttctttatctgccagagaataagccctgttacctgctggatattggctgtggcactgggctgagtggaagttatctgtcagatgaagggcactattgggtgggcctggatatcagccctgccatgctggatgaggctgtggaccgagagatagagggagacctgctgctgggggatatgggccagggcatcccattcaagccaggcacatttgatggttgcatcagcatttctgctgtgcagtggctctgtaatgctaacaagaagtctgaaaaccctgccaagcgcctgtactgcttttttgcttctcttttttctgttctcgtgactgtcctgcagctgtaccctgagaactcagagcagttggagctgatcacaacccaggccacaaaggcaggcttctccggtggcatggtggtagactaccctaacagtgccaaagcaaagaaattctacctctgcttgttttctgggccttcgacctttataccagaggggctgagtgaaaatcaggatgaagttgaacccagggagtctgtgttcaccaatgagaggttcccattaaggatgtcgaggcggggaatggtgaggaagagtcgggcatgggtgctggagaagaaggagcggcacaggcgccagggcagggaagtcagacctgacacccagtacaccggccgcaagcgcaagccccgcttctaagtcaccacgcggttctggaaaggcacttgcctctgcacttttctatattgttcagctgacaaagtagtattttagaaaagttctaaagttataaaaatgttttctgcagtaaaaaaaaagttctctgggccgggcgtggtggctcacacctgtaatcccagcaccttgggaggctgaggtgggaggatcatttgaggccaggagtttgagacctgcctgggcaacataatgaaacttcctttccagggaggaaaaaaaaaaaaaaaaaaa

SEQ ID NO: 2675 - DNA, 1097 bp, Artificial
  cDNA Sequence
gtccggagcatggcggacccccagagctgttttatgacgagacagaagcccggaaatacgttcgcaactcacggatgattgatatccagaccaggatggctgggcgagcattggagcttctttatctgccagagaataagccctgttacctgctggatattggctgtggcactgggctgagtggaagttatctgtcagatgaagggcactattgggtgggcctggatatcagccctgccatgctggatgaggctgtggaccgagagatagagggagacctgctgctgggggatatgggccagggcatcccattcaagccaggcacatttgatggttgcatcagcatttctgctgtgcagtggctctgtaatgctaacaagaagtctgaaaaccctgccaagcgcctgtactgcttttttgcttctcttttttctgttctcgtccggggatcccgagctgtcctgcagctgtaccctgagaactcagagcagttggagctgatcacaacccaggccacaaaggcaggcttctccggtggcatggtggtagactaccctaacagtgccaaagcaaagaaattctacctctgcttgttttctgggccttcgacctttataccagaggggctgagtgaaaatcaggatgaagttgaacccagggagtctgtgttcaccaatgagaggttcccattaaggatgtcgaggcggggaatggtgaggaagagtcgggcatgggtgctggagaagaaggagcggcacaggcgccagggcagggaagtcagacctgacacccagtacaccggccgcaagcgcaagccccgcttctaagtcaccacgcggttctggaaaggcacttgcctctgcacttttctatattgttcagctgacaaagtagtattttagaaaagttctaaagttataaaaatgttttctgcagtaaaaaaaaagttctctgggccgggcgtggtggctcacacctgtaatcccagcaccttgggaggctgaggtgggaggatcatttgaggccaggagtttgagacctgcctgggcaacataatgaaacttcctttccagggaggaaaaaaaaaaaaaaaaaaa

SEQ ID NO: 2676 - DNA, 554 bp, Artificial
  cDNA Sequence
gtgaggggagcctgaatactgcggggcgtccgggggtcgggaagcggcaagttgcccctgttgctggcgttgcccggaaaggccgtagaatttgggggtgcgggaagggaaggacccgggtgggtgccgatttctgtctctgctcacggatgattgatatccagaccaggatggctgggcgagcattggagcttctttatctgccagagaataagccctgttacctgctggatattggctgtggcactgggctgagtggaagttatctgtcagatgaagggcactattgggtgggcctggatatcagccctgccatgctggatgaggctgtggaccgagagatagagggagacctgctgctgggggatatgggccagggcatcccattcaagccaggcacatttgatggttgcatcagcatttctgctgtgcagtggctctgtaatgctaacaagaagtctgaaaaccctgccaagcgcctgtactgcttttttgcttctcttttttctgttctcgtccggggatcccgagctgtcctgcagctgtaccctgag

SEQ ID NO: 2677 - DNA, 695 bp, Artificial
  cDNA Sequence
ttagcatttctgctgtgcagtggctctgtaatgctaacaagaagtctgaaaaccctgccaagcgcctgtactgcttttttgcttctcttttttctgttctcgtccggggatcccgagctgtcctgcagctgtaccctgagaactcagagcagttggagctgatcacaacccaggccacaaaggcaggcttctccggtggcatggtggtagactaccctaacagtgccaaagcaaagaaattctacctctgcttgttttctgggccttcgacctttataccagaggttcccattaaggatgtcgaggcggggaatggtgaggaagagtcgggcatgggtgctggagaagaaggagcggcacaggcgccagggcagggaagtcagacctgacacccagtacaccggccgcaagcgcaagccccgcttctaagtcaccacgcggttctggaaaggcacttgcctctgcacttttctatattgttcagctgacaaagtagtattttagaaaagttctaaagttataaaaatgttttctgcagtaaaaaaaaagttctctgggccgggcgtggtggctcacacctgtaatcccagcaccttgggaggctgaggtgggaggatcatttgaggccaggagtttgagacctgcctgggcaacataatgaaacttcctttccagggaggaaaaaaaaaaaaaaa

SEQ ID NO: 2678 - DNA, 432 bp, Artificial
  cDNA Sequence
aacagtgccaaagcaaagaaattctacctctgcttgttttctgggccttcgacctttataccagaggggctgagtgaaaatcaggatgaagttgaacccagggagtctgtgttcaccaatgagagggaaggtggagcatttgagagaaggggcatccgaggccaccagactcggaggttcccattaaggatgtcgaggcggggaatggtgaggaagagtcgggcatgggtgctggagaagaaggagcggcacaggcgccagggcagggaagtcagacctgacacccagtacaccggccgcaagcgcaagccccgcttctaagtcaccacgcggttctggaaaggcacttgcctctgcacttttctatattgttcagctgacaaagtagtattttagaaaagttctaaagttataaaaatgttttctgcagta

SEQ ID NO: 2679 - DNA, 469 bp, Artificial
  cDNA Sequence
ttcctgcaggggctgagtgaaaatcaggatgaagttgaacccagggagtctgtgttcaccaatgagaggttcccattaaggatgtcgaggcggggaatggtgaggaagagtcgggcatgggtgctggagaagaaggagcggcacaggcgccagggcagggaagtcagacctgacacccagtacaccggccgcaagcgcaagccccgcttctaagtcaccacgcggttctggaaaggcacttgcctctgcacttttctatattgttcagctgacaaagtagtattttagaaaagttctaaagttataaaaatgttttctgcagtaaaaaaaaagttctctgggccgggcgtggtggctcacacctgtaatcccagcaccttgggaggctgaggtgggaggatcatttgaggccaggagtttgagacctgcctgggcaacataatgaaacttcctttccagggaggaaaaa

SEQ ID NO: 2680 - DNA, 736 bp, Artificial
  cDNA Sequence
gcttctcccagctggagtaggtgggggaggccagacatggaggcccttcctccagtcagatccagccttttggggatcctgttgcaggttacgaggctctcagtgctgttggttcagaaccgagatcacctctataatttcctgctcctcaagatcaacctcttcaaccactgggtgtcagggctggcccaggaggcccgggggtcctgtaactggcaggcccacctacccctgggagctgcagcctgccccctgggccaggctctctgggctgggctggctctgatacaggtccccgtatggctggtgctacagggacccaggctgatgtgggctggcatgtggggcagcaccaagggcctgggcctggccttgctcagtgcctgggagcagctgggcctgtctgtggccatctggacagatctgtttttgtcatgtctgcacggcctgatgttggtggccttgctcttggtggtagtgacctggagggtgtgtcagaagtcccactgcttccgactgggcaggcagctcagtaaggccttgcaagtgaactgcgtggtaaggaagctcctggtacagctgagacgtctgtattggtgggtggagactatgactgccctcacctcctggcacctggcctatctcatcacctggaccacctgcctggcctcccacctgctgcaggctgcctttgagcacacgacccagctggccgaggcccaggaggttgaacccc

SEQ ID NO: 2681 - DNA, 432 bp, Artificial
  cDNA Sequence
acagccgacgaggcaacaattaggctttggggataaaacgaggtgcggagagcgggctggggcatttctccccgagatggcgggtctgacggcggcggccccgcggcccggagtcctcctgctcctgctgtccatcctccacccctctcggcctggaggggtccctggggccattcctggtggagttcctggaggagtcttttatccaggggctggtctcggagcccttggaggaggagcgctggggcctggaggcaaacctcttaagccagttcccggagggcttgcgggtgctggccttggggcagggctcggcgccttccccgcagttacctttccgggggctctggtgcctggtggagtggctgacgctgctgcagcctataaagctgctaaggctggcgctgggcttggtggtgtcccaggagttgg

SEQ ID NO: 2682 - DNA, 590 bp, Artificial
  cDNA Sequence
gagggagagagaaagaaagaaagagagagagagagagagaaagaaagaaagaaagagaaaggaaggaaagaaaagaaaagaaaaagaaagagatcacattcctccagctcactgattcaaatcctagagctctttagggaccctcttagtctctccacatctctctgatgagtaggatccatgcagaggaaatgtcaacccacctgcaatcctgcattcaggaccaactgtcacttccatactctactaaccacccttctagcccctctgaggttcccataggttaggggaacaatgctttttcttccacaggagctgctgcaggcttagtgcctggtgggccaggctttggcccgggagtagttggtgtcccaggagctggcgttccaggtgttggtgtcccaggagctgggattccagttgtcccaggtgctgggatcccaggtgctgcggttccaggggttgtgtcaccagaagcagctgctaaggcagctgcaaaggcagccaaatacggggccaggcccggagtcggagttggaggcattcctacttacggggttggagctgggggctttcccggctttggtgtc

SEQ ID NO: 2683 - DNA, 513 bp, Artificial
  cDNA Sequence
ccgaagctcaggcagcagctgccgccaaggctgccaagtacggagtggggaccccagcagctgcagctgctaaagcagccgccaaagccgcccagtttgggttagttcctggtgtcggcgtggctcctggagttggcgtggctcctggtgtcggtgtggctcctggagttggcttggctcctggagttggcgtggctcctggagttggtgtggctcctggcgttggcgtggctcccggcattggccctggtggagttgcagctgcagcaaaatccgctgccaaggtggctgccaaagcccagctccgagctgcagctgggcttggtgctggcatccctggacttggagttggtgtcggcgtccctggacttggagttggtgctggtgttcctggacttggagttggtgctggtgttcctggcttcggggcagtacctggagccctggctgccgctaaagcagccaaatatggagcagcagtgcctggggtccttggagggctcggggctctcg

SEQ ID NO: 2684 - DNA, 394 bp, Artificial
  cDNA Sequence
aggtatacctccagctgcagccgctaaagcagctaaatacggagtggcagcaagacctggcttcggattgtctcccattttcccaggtggggcctgcctggggaaagcttgtggccggaagagaaaatgagcttcctaggacccctgactcacgacctcatcaacgttggtgctactgcttggtggagaatgtaaaccctttgtaaccccatcccatgcccctccgactccccaccccaggagggaacgggcaggccgggcggccttgcagatccacagggcaaggaaacaagaggggagcggccaagtgccccgaccaggaggccccctacttcagaggcaagggccatgtggtcctggccccccaccccatcccttcccacctaggagctcc

SEQ ID NO: 2685 - DNA, 493 bp, Artificial
  cDNA Sequence
aggatggggaagcagctggtctggccacccctgccctcccttagacctccagagcccccagtgtagccacagaggatgctgttggcttcagccccaagaagacgccgcttcctccagagggctaagtgttgtgactgcagtgcctccctgtcgcaccagtactatgagaaggatgggcagctcttctgcaagaaggactactgggcccgctatggcgagtcctgccatgggtgctctgagcaaatcaccaagggactggttatggtggctggggagctgaagtaccaccccgagtgtttcatctgcctcacgtgtgggacctttatcggtgacggggacacctacacgctggtggagcactccaagctgtactgcgggcactgctactaccagactgtggtgacccccgtcatcgagcagatcctgcctgactcccctggctcccacctgccccacaccgtcaccctggtgtccatcccagcctcatctcatg

SEQ ID NO: 2686 - DNA, 1277 bp, Artificial
  cDNA Sequence
catgaccctcacgatacactgggccacgggctggggcctgagaccagccccctgagctctccggcttatactcccagcggggaggcgggcagctctgcccggcagaaacctgtcttgaggagctgcagcatcgacaggtctccgggcgctggctcactgggctccccggcctcccagcgcaaggacctgggtcgctctgagtccctccgcgtagtctgccggccacaccgcatcttccggccgtcggacctcatccacggggaggtgctgggcaagggctgcttcggccaggctatcaaggtgacacaccgtgagacaggtgaggtgatggtgatgaaggagctgatccggttcgacgaggagacccagaggacgttcctcaaggaggtgaaggtcatgcgatgcctggaacaccccaacgtgctcaagttcatcggggtgctctacaaggacaagaggctcaacttcatcactgagtacatcaagggcggcacgctccggggcatcatcaagagcatggacagccagtacccatggagccagagagtgagctttgccaaggacatcgcatcagggatggcctacctccactccatgaacatcatccaccgagacctcaactcccacaactgcctggtccgcgagaacaagaatgtggtggtggctgacttcgggctggcgcgtctcatggtggacgagaagactcagcctgagggcctgcggagcctcaagaagccagaccgcaagaagcgctacaccgtggtgggcaacccctactggatggcacctgagatgatcaacggccgcagctatgatgagaaggtggatgtgttctcctttgggatcgtcctgtgcgagatcatcgggcgggtgaacgcagaccctgactacctgccccgcaccatggactttggcctcaacgtgcgaggattcctggaccgctactgccccccaaactgccccccgagcttcttccccatcaccgtgcgctgttgcgatctggaccccgagaagaggccatcctttgtgaagctggaacactggctggagaccctccgcatgcacctggccggccacctgccactgggcccacagctggagcagctggacagaggtttctgggagacctaccggcgcggcgagagcggactgcctgcccaccctgaggtccccgactgagccagggccactcagctgcccctgtccccacctctggagaatccacccccaccagattcctccgcgggaggtggccctcagctgggacagtggggacc

SEQ ID NO: 2687 - DNA, 759 bp, Artificial
  cDNA Sequence
ggacagccagtacccatggagccagagagtgagctttgccaaggacatcgcatcagggatggcctacctccactccatgaacatcatccaccgagacctcaactcccacaactgcctggtccgcgagaacaagaatgtggtggtggctgacttcgggctggcgcgtctcatggtggacgagaagactcagcctgagggcctgcggagcctcaagaagccagaccgcaagaagcgctacaccgtggtgggcaacccctactggatggcacctgagatgatcaacggccgcagctatgatgagaaggtggatgtgttctcctttgggatcgtcctgtgcgagatcatcgggcgggtgaacgcagaccctgactacctgccccgcaccatggactttggcctcaacgtgcgaggattcctggaccgctactgccccccaaactgccccccgagcttcttccccatcaccgtgcgctgttgcgatctggaccccgagaagaggccatcctttgtgaagctggaacactggctggagaccctccgcatgcacctggccggccacctgccactgggcccacagctggagcagctggacagaggtttctgggagacctaccggcgcggcgagagcggactgcctgcccaccctgaggtccccgactgagccagggccactcagctgcccctgtccccacctctggagaatccacccccaccagattcctccgcgggaggtggccctcagctgggacagtggggacc

SEQ ID NO: 2688 - DNA, 457 bp, Artificial
  cDNA Sequence
tgccctgcaatgcgatacctgagctacatgtcaccaagccaggtgggctggtgtgtctgaccaccaggaccaactcgtccaaccttcaatacaaggaggctctggaggccaccctggacaggctggagcaggctgggatgtgggaaggcctggtggcctggcctgtggaccgcctgtggaccgctgggagctggctacctccgagctggaggtggtatccggcatctctgccaaggatggcttcatctccggcattgtctacctgtaccgaaagtggaaggcgacccaggttgaggaagtgagatccagcccccagcccccagctggcccctgactccatgtggccttagctgggcccatctgctgggcctcctctgcctcccctgtaaaatgggacctccgaaccaaccctgcccctcagaaatgccctgcctattaaatgagctcccagaaaaca

SEQ ID NO: 2689 - DNA, 1137 bp, Artificial
  cDNA Sequence
ggccgtcgcgcatgcggggctcacacggctgcagccggcgccgctgccactcccgggagcatgaaggaccgaacccaggagctccgcacggccaaggacagcgatgatgatgatgatgtcgctgtcaccgtggaccgagaccgcttcatggatgagttctttgagcaggtggaggagattcgaggcttcattgacaagatcgcagagaacgtggaggaggtgaagcggaagcacagtgccatcctggcatcccccaaccccgatgagaagacgaaggaggagctggaagaactcatgtccgacataaagaagacagcaaacaaagttcgttccaagttaaagagcatcgagcagtccatcgagcaagaggaaggcctgaaccgctcctccgctgacctgaggatccggaagacacagcactccacgctgtccagaaagtttgtggaggtcatgtcggagtacaacgccacgcagtccgactaccgcgagcgctgcaaaggccgcatccagaggcagctggagatcaccggcaggaccacgaccagtgaggagctggaggacatgctggagagtgggaaccccgccatctttgcctctgggatcatcatggactccagcatctcgaagcaggctctgagcgagattgagacgcggcacagtgagatcatcaagctggagaacagcatccgtgagctacacgacatgttcatggacatggccatgctcgtggagagccagcctcagggtgctttcctgaagtcctgccccgagccccaacccaaccctgaggagggggccctctggagctcgggtgcccccggccccgcagggagagatgattgacaggatcgagtacaatgtggaacacgcggtagactatgtggagagggccgtgtctgacaccaagaaggccgtcaagtaccagagcaaggcgcgccggaagaaaatcatgatcatcatctgctgtgtgatcctgggcatcgtcatcgcctccactgttgggggcatcttcgcctagaagccacccaaactgccactccactccaggtgggccactccaaggaggccctggctgctgccacctggctgggctgccctcccaacccccgcctctggctcagagcaccctccctcccg

SEQ ID NO: 2690 - DNA, 1043 bp, Artificial
  cDNA Sequence
ggccgtcgcgcatgcggggctcacacggctgcagccggcgccgctgccactcccgggagcatgaaggaccgaacccaggagctccgcacggccaaggacagcgatgatgatgatgatgtcgctgtcaccgtggaccgagaccgcttcatggatgagttctttgagcaggtggaggagattcgaggcttcattgacaagatcgcagagaacgtggaggaggtgaagcggaagcacagtgccatcctggcatcccccaaccccgatgagaagacgaaggaggagctggaagaactcatgtccgacataaagaagacagcaaacaaagttcgttccaagttaaagagcatcgagcagtccatcgagcaagaggaaggcctgaaccgctcctccgctgacctgaggatccggaagacacagcactccacgctgtccagaaagtttgtggaggtcatgtcggagtacaacgccacgcagtccgactaccgcgagcgctgcaaaggccgcatccagaggcagctggagatcaccggcaggaccacgaccagtgaggagctggaggacatgctggagagtgggaaccccgccatctttgcctctgggatcatcatggactccagcatctcgaagcaggctctgagcgagattgagacgcggcacagtgagatcatcaagctggagaacagcatccgtgagctacacgacatgttcatggacatggccatgctcgtggagagccagggagagatgattgacaggatcgagtacaatgtggaacacgcggtagactatgtggagagggccgtgtctgacaccaagaaggccgtcaagtaccagagcaaggcgcgccggaagaaaatcatgatcatcatctgctgtgtgatcctgggcatcgtcatcgcctccactgttgggggcatcttcgcctagaagccacccaaactgccactccactccaggtgggccactccaaggaggccctggctgctgccacctggctgggctgccctcccaacccccgcctctggctcagagcaccctccctc

SEQ ID NO: 2691 - DNA, 567 bp, Artificial
  cDNA Sequence
ctcacacggctgcagccggcgccgctgccactcccgggagcatgaaggaccgaacccaggagctccgcacggccaaggacagcgatgatgatgatgatgtcgctgtcaccgtggaccgagaccgcttcatggatgagttctttgagcaggtggaggagattcgaggcttcattgacaagatcgcagagaacgtggaggaggtgaagcggaagcacagtgccatcctggcatcccccaaccccgatgagaagacgaaggaggagctggaagaactcatgtccgacataaagaagacagcaaacaaagttcgttccaagttaaagagcatcgagcagtccatcgagcaagaggaaggcctgaaccgctcctccgctgacctgaggatccggaagacacaggtgcggccacggagtctaggatgggcgggcacctgagtctctgggtcggtccccgcagggcctgacccctgcacctccatctcgggcccccagcactccacgctgtccagaaagtttgtggaggtcatgtcggagtacaacgccacgcagtccgactaccgcgagcgct

SEQ ID NO: 2692 - DNA, 295 bp, Artificial
  cDNA Sequence
ctcccgggagcatgaaggaccgaacccaggagctccgcacggccaaggacagcgatgatgatgatgatgtcgctgtcaccgtggaccgagaccgcttcatggatgagttctttgagcaggtggaggagattcgaggcttcattgacaagatcgcagagaacgtggaggaggtgaagcggaagcacagtgccatcctggcatcccccaaccccgatgagaagacgaaggaggagctggaagaactcatgtccgacataaagaagacagcaaacaaagttcgttccaagttaaagag

SEQ ID NO: 2693 - DNA, 960 bp, Artificial
  cDNA Sequence
gatgctgggtgtgcgggtaggggacggggttgaaggggcctggttatgacttagcagccacctgtgcccccaggcatcgagcagtccatcgagcaagaggaaggcctgaaccgctcctccgctgacctgaggatccggaagacacaggtgcggccacggagtctaggatgggcgggcacctgagtctctgggtcggtccccgcagggcctgacccctgcacctccatctcgggcccccagcactccacgctgtccagaaagtttgtggaggtcatgtcggagtacaacgccacgcagtccgactaccgcgagcgctgcaaaggccgcatccagaggcagctggagatcaccggcaggaccacgaccagtgaggagctggaggacatgctggagagtgggaaccccgccatctttgcctctgggatcatcatggactccagcatctcgaagcaggctctgagcgagattgagacgcggcacagtgagatcatcaagctggagaacagcatccgtgagctacacgacatgttcatggacatggccatgctcgtggagagccagcctcagggtgctttcctgaagtcctgccccgagccccaacccaaccctgaggagggggccctctggagctcgggtgcccccggccccgcagggagagatgattgacaggatcgagtacaatgtggaacacgcggtagactatgtggagagggccgtgtctgacaccaagaaggccgtcaagtaccagagcaaggcgcgccggaagaaaatcatgatcatcatctgctgtgtgatcctgggcatcgtcatcgcctccactgttgggggcatcttcgcctagaagccacccaaactgccactccactccaggtgggccactccaaggaggccctggctgctgccacctggctgggctgccctcccaacccccgcctctggctcagagcaccctccctcccg

SEQ ID NO: 2694 - DNA, 690 bp, Artificial
  cDNA Sequence
gttccccgcgctgcgcggagcagggaccaggcggttgcggcggcgacagccatggccggcgcgctggcaggtctggccgcgggcttgcaggtcccgcgggtcgcgcccagcccagactcggactcggacacagactcggaggacccgagtctccggcgcagcgcgggcggcttgctccgctcgcaggtcatccacagcggtcacttcatggtgtcgtcgccgcacagcgactcgctgccccggcggcgcgaccaggaggggtccgtggggccctccgacttcgggccgcgcagtatcgaccccacactcacacgcctcttcgagtgcttgagcctggcctacagtggcaagctggtgtctcccaagtggaagaatttcaaaggcctcaagctgctctgcagagacaagatccgcctgaacaacgccatctggagggcctggtatatccagtatttctttaccaactcccgcctcccacagccgcccatgccttcaaacttcccagagccccccagcttcagccccgtggttgactccctcttcagcagtgggaccctgggcccagaggtgcccccggcttcctcggccatgacccacctctctggacacagccgtctgcaggctcggaacagctgccctggccccttggactccagcgccttcctgagttctgatttcctccttcctgaa

SEQ ID NO: 2695 - DNA, 620 bp, Artificial
  cDNA Sequence
gaccaggcggttgcggcggcgacagccatggccggcgcgctggcaggtctggccgcgggcttgcaggtcccgcgggtcgcgcccagcccagactcggactcggacacagactcggaggacccgagtctccggcgcagcgcgggcggcttgctccgctcgcaggtcatccacagcggtcacttcatggtgtcgtcgccgcacagcgactcgctgccccggcggcgcgaccaggaggggtccgtggggccctccgacttcgggccgcgcagtatcgaccccacactcacacgcctcttcgagtgcttgagcctggcctacagtggcaagctggtgtctcccaagtggaagaatttcaaaggcctcaagctgctctgcagagacaagatccgcctgaacaacgccatctggagggcctggtatatccagtatgtgaagcggaggaagagccccgtgtgtggcttcgtgacccccctgcaggggcctgaggctgatgcgcaccggaagccggaggccgtggtcctggaggggaactactggaagcggcgcatcgaggtggtgatgcgggaataccacaagtggcgcatctactacaagaagcgggtcagtgggggagggccagg

SEQ ID NO: 2696 - DNA, 546 bp, Artificial
  cDNA Sequence
gggtctgtctgtccctaccacaggcagtgaacggcggctgtcaggggacctcagctccatgccaggccctgggactctgagcgtccgtgtctctcccccgcaacccatcctcagccggggccgtccagacagcaacaagaccgagaaccggcgtatcacacacatctccgcggagcagaagcggcgcttcaacatcaagctggggtttgacacccttcatgggctcgtgagcacactcagtgcccagcccagcctcaaggtgagcaaagctaccacgctgcagaagacagctgagtacatccttatgctacagcaggagcgtgcgggcttgcaggaggaggcccagcagctgcgggatgagattgaggagctcaatgccgccattaacctgtgccagcagcagctgcccgccacaggggtacccatcacacaccagcgttttgaccagatgcgagacatgtttgatgactacgtccgaacccgtacgctgcacaactggaagttctgggtgttcagcatcctcatccggcctctgtttgagtcctt

SEQ ID NO: 2697 - DNA, 1479 bp, Artificial
  cDNA Sequence
gcagagccgtgcgggcgcccgcgtactcactagctgaggtggcagtggttccaccaacatggagctctcgcagatgtcggagctcatggggctgtcggtgttgcttgggctgctggccctgatggcgacggcggcggtagcgcgggggtggctgcgcgcgggggaggagaggagcggccggcccgcctgccaaaaagcaaatggatttccacctgacaaatcttcgggatccaagaagcagaaacaatatcagcggattcggaaggagaagcctcaacaacacaacttcacccaccgcctcctggctgcagctctgaagagccacagcgggaacatatcttgcatggactttagcagcaatggcaaatacctggctacctgtgcagatgatcgcaccatccgcatctggagcaccaaggacttcctgcagcgagagcaccgcagcatgagagccaacgtggagctggaccacgccaccctggtgcgcttcagccctgactgcagagccttcatcgtctggctggccaacggggacaccctccgtgtcttcaagatgaccaagcgggaggatgggggctacaccttcacagccaccccagaggacttccctaaaaagcacaaggcgcctgtcatcgacattggcattgctaacacagggaagtttatcatgactgcctccagtgacaccactgtcctcatctggagcctgaagggtcaagtgctgtctaccatcaacaccaaccagatgaacaacacacacgctgctgtatctccctgtggcagatttgtagcctcgtgtggcttcaccccagatgtgaaggtttgggaagtctgctttggaaagaagggggagttccaggaggtggtgcgagccttcgaactaaagggccactccgcggctgtgcactcgtttgctttctccaacgactcacggaggatggcttctgtctccaaggatggtacatggaaactgtgggacacagatgtggaatacaagaagaagcaggacccctacttgctgaagacaggccgctttgaagaggcggcgggtgccgcgccgtgccgcctggccctctcccccaacgcccaggtcttggccttggccagtggcagtagtattcatctctacaatacccggcggggcgagaaggaggagtgctttgagcgggtccatggcgagtgtatcgccaacttgtcctttgacatcactggccgctttctggcctcctgtggggaccgggcggtgcggctgtttcacaacactcctggccaccgagccatggtggaggagatgcagggccacctgaagcgggcctccaacgagagcacccgccagaggctgcagcagcagctgacccaggcccaagagaccctgaagagcctgggtgccctgaagaagtgactctgggagggcccggcgcagaggattgaggaggagggatctggcctcctcatggcactgctgccatctttcctccc

SEQ ID NO: 2698 - DNA, 1456 bp, Artificial
  cDNA Sequence
gcagagccgtgcgggcgcccgcgtactcactagctgaggtggcagtggttccaccaacatggagctctcgcagatgtcggagctcatggggctgtcggtgttgcttgggctgctggccctgatggcgacggcggcggtagcgcgggggtggctgcgcgcgggggaggagaggagcggccggcccgcctgccaaaaagcaaatggatttccacctgacaaatcttcgggatccaagaagcagaaacaatatcagcggattcggaaggagaagcctcaacaacacaacttcacccaccgcctcctggctgcagctctgaagagccacagcgggaacatatcttgcatggactttagcagcaatggcaaatacctggctacctgtgcagatgatcgcaccatccgcatctggagcaccaaggacttcctgcagcgagagcaccgcagcatgagagccaacgtggagctggaccacgccaccctgagccttcatcgtctggctggccaacggggacaccctccgtgtcttcaagatgaccaagcgggaggatgggggctacaccttcacagccaccccagaggacttccctaaaaagcacaaggcgcctgtcatcgacattggcattgctaacacagggaagtttatcatgactgcctccagtgacaccactgtcctcatctggagcctgaagggtcaagtgctgtctaccatcaacaccaaccagatgaacaacacacacgctgctgtatctccctgtggcagatttgtagcctcgtgtggcttcaccccagatgtgaaggtttgggaagtctgctttggaaagaagggggagttccaggaggtggtgcgagccttcgaactaaagggccactccgcggctgtgcactcgtttgctttctccaacgactcacggaggatggcttctgtctccaaggatggtacatggaaactgtgggacacagatgtggaatacaagaagaagcaggacccctacttgctgaagacaggccgctttgaagaggcggcgggtgccgcgccgtgccgcctggccctctcccccaacgcccaggtcttggccttggccagtggcagtagtattcatctctacaatacccggcggggcgagaaggaggagtgctttgagcgggtccatggcgagtgtatcgccaacttgtcctttgacatcactggccgctttctggcctcctgtggggaccgggcggtgcggctgtttcacaacactcctggccaccgagccatggtggaggagatgcagggccacctgaagcgggcctccaacgagagcacccgccagaggctgcagcagcagctgacccaggcccaagagaccctgaagagcctgggtgccctgaagaagtgactctgggagggcccggcgcagaggattgaggaggagggatctggcctcctcatggcactgctgccatctttcctccc

SEQ ID NO: 2699 - DNA, 754 bp, Artificial
  cDNA Sequence
gggtgcgcgcgctttctcgcgcacgcgcgcacggagggggcgacggccgctgtgacgctgcggcggcggcgggcgggcggcggcgcgtgaggcgcgcgatccccggtgtcttgggagcagtgccccggcccccgccgctcccgccgccgccatgtcgggccggtcggtccgggcggagacccgcagccgggccaaggacgacatcaagaaggtgatggcggccatcgagaaagtgcggaaatgggagaagaagtgggtgactgtgggtgacacgtccctgaggatatttaagtgggttcctgtgacagacagcaaggagaaagaaaagtcaaaatcgaacagttcagcagcccgagaacctaatggctttccttctgatgcctcagccaattcctctctccttcttgaattccaggacgaaaacagcaaccagagttccgtgtctgacgtctatcagcttaaggtggacagcagcaccaactcaagccccagcccccagcagagtgagtccctgagcccagcacacacctccgacttccgcacggatgactcccagcccccaacgctgggccaggagatcctggaggagccctccctgccctcctcggaagttgctgatgaacctcctaccctcaccaaggaagaaccagttccactagagacacaggaagaggaagactcaggtgccccgcccctgaagcgcttctgtgtggaccaacccacagtgccgcagacggcgtcagaaagctagcac

SEQ ID NO: 2700 - DNA, 809 bp, Artificial
  cDNA Sequence
ggggcgacggccgctgtgacgctgcggcggcggcgggcgggcggcggcgcgtgaggcgcgcgatccccggtgtcttgggagcagtgccccggcccccgccgctcccgccgccgccatgtcgggccggtcggtccgggcggagacccgcagccgggccaaggacgacatcaagaaggtgatggcggccatcgagaaagtgcggaaatgggagaagaagtgggtgactgtgggtgacacgtccctgaggatatttaagtgggttcctgtgacagacagcaaggagaaagaaaagtcaaaatcgaacagttcagcagcccgagaacctaatggctttccttctgatgcctcagccaattcctctctccttcttgaattccaggagccctccctgccctcctcggaagttgctgatgaacctcctaccctcaccaaggaagaaccagttccactagagacacaggtcgttgaggaagaggaagactcaggtgccccgcccctgaagcgcttctgtgtggaccaacccacagtgccgcagacggcgtcagaaagctagcaccatcccggccctccgcctcctggccctgcctctatttattgcattctggttctggccgcgccgcgttgctggggtaagggcaagcactggggtcaagagcctgcacacatgagccttccgggctggaaggctggcgtaggacttggggctgtagcatcatcttcctgaccctggcacctgtgtctacttgctcccgagaagaggagcgctcatgtcttttttgcaccccaagttggctggagcatcggccacc

SEQ ID NO: 2701 - DNA, 966 bp, Artificial
  cDNA Sequence
cggcggcgggcgggcggcggcgcgtgaggcgcgcgatccccggtgtcttgggagcagtgccccggcccccgccgctcccgccgccgccatgtcgggccggtcggtccgggcggagacccgcagccgggccaaggacgacatcaagaaggtgatggcggccatcgagaaagtgcggaaatgggagaagaagtgggtgactgtgggtgacacgtccctgaggatatttaagtgggttcctgtgacagacagcaaggagaaagaaaagtcaaaatcgaacagttcagcagcccgagaacctaatggctttccttctgatgcctcagccaattcctctctccttcttgaattccaggacgaaaacagcaaccagagttccgtgtctgacgtctatcagcttaaggtggacagcagcaccaactcaagccccagcccccagcagagtgagtccctgagcccagcacacacctccgacttccgcacggatgactcccagcccccaacgctgggccaggagatcctggaggagccctccctgccctcctcggaagttgctgatgaacctcctaccctcaccaaggaagaaccagttccactagagacacaggtcgttgaggaagaggaagactcaggtgccccgcccctgaagcgcttctgtgtggaccaacccacagtgccgcagacggcgtcagaaagctagcaccatcccggccctccgcctcctggccctgcctctatttattgcattctggttctggccgcgccgcgttgctggggtaagggcaagcactggggtcaagagcctgcacacatgagccttccgggctggaaggctggcgtaggacttggggctgtagcatcatcttcctgaccctggcacctgtgtctacttgctcccgagaagaggagcgctcatgtcttttttgcaccccaagttggctggagcatcggccaccccaagattcatct

SEQ ID NO: 2702 - DNA, 628 bp, Artificial
  cDNA Sequence
ccgccgccgccatgtcgggccggtcggtccgggcggagacccgcagccgggccaaggacgacatcaagaaggtgatggcggccatcgagaaagtgcggaaatgggagaagaagtgggtgactgtgggtgacacgtccctgaggatatttaagtgggttcctgtgacagacagcaaggagacgaaaacagcaaccagagttccgtgtctgacgtctatcagcttaaggtggacagcagcaccaactcaagccccagcccccagcagagtgagtccctgagcccagcacacacctccgacttccgcacggatgactcccagcccccaacgctgggccaggagatcctggaggagccctccctgccctcctcggaagttgctgatgaacctcctaccctcaccaaggaagaaccagttccactagagacacaggtcgttgaggaagaggaagactcaggtgccccgcccctgaagcgcttctgtgtggaccaacccacagtgccgcagacggcgtcagaaagctagcaccatcccggccctccgcctcctggccctgcctctatttattgcattctggttctggccgcgccgcgttgctggggtaagggcaagcactggggtcaagagcct

SEQ ID NO: 2703 - DNA, 732 bp, Artificial
  cDNA Sequence
ccgggcggagacccgcagccgggccaaggacgacatcaagaaggtgatggcggccatcgagaaagtgcggaaatgggagaagaagtgggtgactgtgggtgacacgtccctgaggatatttaagtgggttcctgtgacagacagcaaggagaaagaaaagtcaaaatcgaacagttcagcagcccgagaacctaatggctttccttctgatgcctcagccaattcctctctccttcttgaattccagggactgggtagagacattggagggaagggaagggcttttctccacacaagggcagagagtccgtctagatttcttgctgtcctgccagctctgcccatgcctgaggtggtcctacctctcacgggcaccctagctgctgacagccctttgtggccgccgtccccatcccctgccctcagcacacacatctgcacacacgcagctttgttctcacctctacctgtcattccagcatccctgcctcttgtcacaaactgccccagcaagaatttgaggttctgacaacagtacccatcccccacagtaccccttcagctcagtttctagaaagctcccttttctttgaaatctgcatgttgaattgaactttgtgattttattttttgtttcaaaaaagtttaagaaaatggaaatgggcaacagtgagtgaagacatattttagcactgaatagaatatttttaaaattaaactatttgaaatatg

SEQ ID NO: 2704 - DNA, 761 bp, Artificial
  cDNA Sequence
ccgggcggagacccgcagccgggccaaggacgacatcaagaaggtgatggcggccatcgagaaagtgcggaaatgggagaagaagtgggtgactgtgggtgacacgtccctgaggatatttaagtgggttcctgtgacagacagcaaggagaaagaaaagtcaaaatcgaacagttcagcagcccgagaacctaatggctttccttctgatgcctcagccaattcctctctccttcttgaattccaggacgaaaacagcaaccagagttccgtgtctgacgtctatcagcttaaggtggacagcagcaccaactcaagccccagcccccagcagagtgagtccctgagcccagcacacacctccgacttccgcacggatgactcccagcccccaacgctgggccaggagatcctggagggtcgttgaggaagaggaagactcaggtgccccgcccctgaagcgcttctgtgtggaccaacccacagtgccgcagacggcgtcagaaagctagcaccatcccggccctccgcctcctggccctgcctctatttattgcattctggttctggccgcgccgcgttgctggggtaagggcaagcactggggtcaagagcctgcacacatgagccttccgggctggaaggctggcgtaggacttggggctgtagcatcatcttcctgaccctggcacctgtgtctacttgctcccgagaagaggagcgctcatgtcttttttgcaccccaagttggctggagcatc

SEQ ID NO: 2705 - DNA, 726 bp, Artificial
  cDNA Sequence
aggggattccggcttccggcccggactggagctgcctggcgtcggtgcccgcgcccggcccagcccggggcccgccctcccctcttcctgggcagtggccccgcctgcgtttccaggcttcctcttgataatagcgagtagccctggagtggtgtcagcccgccaggctgagcgctctgcgtattcaggcgttgaagttggggagaagaagtgggtgactgtgggtgacacgtccctgaggatatttaagtgggttcctgtgacagacagcaaggagacgaaaacagcaaccagagttccgtgtctgacgtctatcagcttaaggtggacagcagcaccaactcaagccccagcccccagcagagtgagtccctgagcccagcacacacctccgacttccgcacggatgactcccagcccccaacgctgggccaggagatcctggaggagccctccctgccctcctcggaagttgctgatgaacctcctaccctcaccaaggaagaaccagttccactagagacacaggtcgttgaggaagaggaagactcaggtgccccgcccctgaagcgcttctgtgtggaccaacccacagtgccgcagacggcgtcagaaagctagcaccatcccggccctccgcctcctggccctgcctctatttattgcattctggttctggccgcgccgcgttgctggggtaagggcaagcactggggtcaagagcct

SEQ ID NO: 2706 - DNA, 967 bp, Artificial
  cDNA Sequence
ccggactggagctgcctggcgtcggtgcccgcgcccggcccagcccggggcccgccctcccctcttcctgggcagtggccccgcctgcgtttccaggcttcctcttgataatagcgagtagccctggagtggtgtcagcccgccaggctgagcgctctgcgtattcaggcgttgaagttggggagaagaagtgggtgactgtgggtgacacgtccctgaggatatttaagtgggttcctgtgacagacagcaaggagaaagaaaagtcaaaatcgaacagttcagcagcccgagaacctaatggctttccttctgatgcctcagccaattcctctctccttcttgaattccaggacgaaaacagcaaccagagttccgtgtctgacgtctatcagcttaaggtggacagcagcaccaactcaagccccagcccccagcagagtgagtccctgagcccagcacacacctccgacttccgcacggatgactcccagcccccaacgctgggccaggagatcctggaggagccctccctgccctcctcggaagttgctgatgaacctcctaccctcaccaaggaagaaccagttccactagagacacaggtcgttgaggaagaggaagactcaggtgccccgcccctgaagcgcttctgtgtggaccaacccacagtgccgcagacggcgtcagaaagctagcaccatcccggccctccgcctcctggccctgcctctatttattgcattctggttctggccgcgccgcgttgctggggtaagggcaagcactggggtcaagagcctgcacacatgagccttccgggctggaaggctggcgtaggacttggggctgtagcatcatcttcctgaccctggcacctgtgtctacttgctcccgagaagaggagcgctcatgtcttttttgcaccccaagttggctggagcatcggccaccccaagattcatct

SEQ ID NO: 2707 - DNA, 722 bp, Artificial
  cDNA Sequence
ggactggagctgcctggcgtcggtgcccgcgcccggcccagcccggggcccgccctcccctcttcctgggcagtggccccgcctgcgtttccaggcttcctcttgataatagcgagtagccctggagtggtgtcagcccgccaggctgagcgctctgcgtattcaggcgttgaagttggggagaagaagtgggtgactgtgggtgacacgtccctgaggatatttaagtgggttcctgtgacagacagcaaggagaaagaaaagtcaaaatcgaacagttcagcagcccgagaacctaatggctttccttctgatgcctcagccaattcctctctccttcttgaattccaggagccctccctgccctcctcggaagttgctgatgaacctcctaccctcaccaaggaagaaccagttccactagagacacaggtcgttgaggaagaggaagactcaggtgccccgcccctgaagcgcttctgtgtggaccaacccacagtgccgcagacggcgtcagaaagctagcaccatcccggccctccgcctcctggccctgcctctatttattgcattctggttctggccgcgccgcgttgctggggtaagggcaagcactggggtcaagagcctgcacacatgagccttccgggctggaaggctggcgtaggacttggggctgtagcatcatcttcctgaccctggcacctgtgtctacttgctcc

SEQ ID NO: 2708 - DNA, 1339 bp, Artificial
  cDNA Sequence
gggggagcaagttagtgtgtgccagccgccagtccccaccgccgccgccgcgatggcgccgctcctgggccgcaagcccttcccgctggtgaagccgttgcccggagaggagccgctcttcaccatcccgcacactcaggaggccttccgcacccgggaagagtatgaagcccgcttggaaaggtacagtgagcgcatttggacgtgcaagagtactggaagcagtcagctaacacacaaggaagcctgggaggaagaacaggaagttgctgagcttttgaaggaggagtttcctgcctggtatgagaagcttgttctggaaatggttcaccataacacagcctccttagagaagttagtagatactgcttggttggagatcatgaccaaatatgctgtgggagaagagtgtgacttcgaggttgggaaggagaaaatgctcaaggtgaagattgtgaagattcatcctttggagaaagtggatgaagaggccactgagaagaaatctgatggtgcctgtgattctccatcaagtgacaaagagaactccagtcagattgctcaggaccatcagaagaaggagacagttgtgaaagaggatgaaggaaggagagagagtattaatgacagagcacgtagatcgccacgaaaacttcctacttcattaaaaaaaggagaaaggaaatgggctcctccaaaatttctgcctcacaaatatgatgtgaaactacaaaatgaagataagatcatcagtaacgtgccagcagacagcttgattcgtacagagcgcccaccaaataaggagatagttcgatactttatacggcataatgcattacgagctggtactggtgaaaatgcaccttgggtcgtagaagatgaattggtgaagaaatactctctgcccagcaagttcagtgactttttacttgatccatacaagtatatgactctcaacccttctactaagaggaagaatactggatccccagacaggaagccctcaaagaaatccaagacagacaactcttctcttagttcaccactaaatcctaagttatggtgtcacgtacacttgaagaagtcattgagtggctcgccactcaaagtgaagaactcaaagaattccaaatctcctgaagaacatctagaagaaatgatgaagatgatgtcgcccaataagctgcacactaactttcacattcctaaaaaaggcccacctgccaagaaaccagggaagcacagtgacaagcctttgaaggcaaagggcagaagcaaaggcatcctgaatggacagaaatccacagggaattccaaatctcccaaaaaaggactgaag

SEQ ID NO: 2709 - DNA, 1451 bp, Artificial
  cDNA Sequence
gcggccgcgccggcggtgagggagccggagttcgcgccgccctctcacccctcccttcccccaccccacccccgggcgcctggcgctcgctccgggccgcggggcctagtgctgcgccgcggggccggccccagcagccgccagtccccaccgccgccgccgcgatggcgccgctcctgggccgcaagcccttcccgctggtgaagccgttgcccggagaggagccgctcttcaccatcccgcacactcaggaggccttccgcacccgggaagagtatgaagcccgcttggaaaggtacagtgagcgcatttggacgtgcaagagtactggaagcagtcagctaacacacaaggaagcctgggaggaagaacaggaagttgctgagcttttgaaggaggagtttcctgcctggtatgagaagcttgttctggaaatggttcaccataacacagcctccttagagaagttagtagatactgcttggttggagatcatgaccaaatatgctgtgggagaagagtgtgacttcgaggttgggaaggagaaaatgctcaaggtgaagattgtgaagattcatcctttggagaaagtggatgaagaggccactgagaagaaatctgatggtgcctgtgattctccatcaagtgacaaagagaactccagtcagattgctcaggaccatcagaagaaggagacagttgtgaaagaggatgaaggaaggagagagagtattaatgacagagcacgtagatcgccacgaaaacttcctacttcattaaaaaaaggagaaaggaaatgggctcctccaaaatttctgcctcacaaatatgatgtgaaactacaaaatgaagataagatcatcagtaacgtgccagcagacagcttgattcgtacagagcgcccaccaaataaggagatagttcgatactttatacggcataatgcattacgagctggtactggtgaaaatgcaccttgggtcgtagaagatgaattggtgaagaaatactctctgcccagcaagttcagtgactttttacttgatccatacaagtatatgactctcaacccttctactaagaggaagaatactggatccccagacaggaagccctcaaagaaatccaagacagacaactcttctcttagttcaccactaaatcctaagttatggtgtcacgtacacttgaagaagtcattgagtggctcgccactcaaagtgaagaactcaaagaattccaaatctcctgaagaacatctagaagaaatgatgaagatgatgtcgcccaataagctgcacactaactttcacattcctaaaaaaggcccacctgccaagaaaccagggaagcacagtgacaagcctttgaaggcaaagggcagaagcaaaggcatcctgaatggacagaaatccacagggaattccaaatctcccaaaaaaggactgaag

SEQ ID NO: 2710 - DNA, 1116 bp, Artificial
  cDNA Sequence
gaaattgtgaagtttgagccccaagtagatacagaagctgaagacatgattagtgctgtgaagagcagaaggttgcttgccattcaagctaagaaggaacgggaaatccaggaaagagaaatgaaagtgaaactggaacgccaagctgaagaagaacgaatacggaagcacaaagcagctgctgagaaagctttccaggaagggattgccaaggccaaactagtcatgcgcaggactcctattggcacagatcgaaaccataatagatactggctcttctcagatgaagttccaggattattcattgaaaaaggctgggtacatgacagcattgactaccgattcaaccatcactgcaaagaccacacagtctctggtgatgaggattactgtcctcgcagtaagaaagcaaacttaggtaaaaatgcaagcatgaacacacaacatggaacagcaacagaagttgctgtagagacaaccacacccaaacaaggacagaacctatggtttttatgtgatagtcaaaaggagctggatgagttgctaaactgtcttcaccctcagggaataagagaaagtcaacttaaagagagactagagaagaggtaccaggacattattcactctattcatctagcacggaagccaaatttgggtctaaaatcttgtgatggcaaccaggagcttttaaacttccttcgtagtgatctcattgaagttgcaacaaggttacaaaaaggaggacttggatatgtggaagaaacatcagaatttgaagcccgggtcatttcattagagaaattgaaggattttggtgagtgtgtgattgcccttcaggccagtgtcataaagaaatttctccaaggcttcatggctcccaagcaaaagagaagaaaactccaaagtgaagattcagcaaaaactgaggaagtggatgaagagaagaaaatggtagaggaagcaaaggttgcatctgcactggagaaatggaagacagcaatccgggaagctcagactttctccaggatgcacgtgctgcttgggatgcttgatgcctgtatcaagtgggatatgtccgcagaaaatgctaggtgcaaagtttgtcgaaagaaaggt

SEQ ID NO: 2711 - DNA, 535 bp, Artificial
  cDNA Sequence
aagaagattatgaggtggctggtttgcgattgagacctcgaaagaccatccggggcaagcacagcgtcatcccccctgcagcaaggtcaggccggcgcccgggtaagaagccacactctaccaggaggtctcagcccaaggcaccacctgtggatgatgctgaggtggatgagctggtgcttcagaccaagcggagctcccggaggcaaagcctggagctgcagaagtgtgaagagatcctccacaagatcgtgaagtaccgcttcagctggcccttcagggagcctgtgaccagagatgaggccgaggactactatgatgtgatcacgcaccccatggactttcagacagtgcagaacaaatgttcctgtgggagctaccgctctgtgcaggagtttcttactgacatgaagcaagtgtttaccaatgctgaggtttacaactgccgtggcagccatgtgctaagctgcatggtgaagacagaacagtgtctagtggctctgttgcataaacaccttcctggccacccatatgt

SEQ ID NO: 2712 - DNA, 1150 bp, Artificial
  cDNA Sequence
tgcctgctgttccctgctgggaagaaggaaagccagtgatgctggcttgaggctgtagtgggaggcccagcggattgtgagaagccagcccgggcagtgagtgtggatggcttggcaggtgagcctgctggagctggaggactggcttcagtgtcccatctgcctggaggtcttcaaggagcccctgatgctgcagtgtggccactcttactgcaagggctgcctggtttccctgtcctgccacctggatgccgagctgcgctgccccgtgtgccggcaggcggtggacggcagcagctccctgcccaacgtctccctggccagggtgatcgaagccctgaggctccctggggacccggagcccaaggtctgcgtgcaccaccggaacccgctcagccttttctgcgagaaggaccaggagctcatctgtggcctctgcggtctgctgggctcccaccaacaccacccggtcacgcccgtctccaccgtctacagccgcatgaaggaggagctcgcagccctcatctctgagctgaagcaggagcagaaaaaggtggatgagctcatcgccaaactggtgaacaaccggacccgaatcgtcaatgagtcggatgtcttcagctgggtgatccgccgcgagttccaggagctgcaccacctggtggatgaggagaaggcccgctgcctggaggggatagggggtcacacccgtggcctggtggcctccctggacatgcagctggagcaggcccagggaacccgggagcggctggcccaagccgagtgtgtgctggaacagttcggcaatgaggaccaccacaagttcatccggaagttccactccatggcctccagagcagagatgccgcaggcccggcccttagaaggcgcattcagccccatctccttcaagccaggcctccaccaggctgacatcaagctgaccgtgtggaaaaggctcttccggaaagttttgccagccccggagcctctcaagttggaccctgccactgcccacccactcctggagctctccaagggcaacacggtggtgcagtgcgggcttctggcccagcggcgagccagccagcctgagcgcttcgactacagcacctgcgtcctggccagccgcggcttctcctgcggccgc

SEQ ID NO: 2713 - DNA, 513 bp, Artificial
  cDNA Sequence
cagttcggcaatgaggaccaccacaagttcatccggaagttccactccatggcctccagagcagagatgccgcaggcccggcccttagaaggcgcattcagccccatctccttcaagccaggcctccaccaggctgacatcaagctgaccgtgtggaaaaggctcttccggaaagttttgccagggagcagccctgtactggccccttctagaccctggggctagagagatgaggaagacacagcccctctccttggggagttcagggcctccatcagcttctgtgggccgggtctgctgccctccacgtggcctcacagaccctctgtgatctccctcccagccccggagcctctcaagttggaccctgccactgcccacccactcctggagctctccaagggcaacacggtggtgcagtgcgggcttctggcccagcggcgagccagccagcctgagcgcttcgactacagcacctgcgtcctggccagccgcggcttctcctgcggccgc

SEQ ID NO: 2714 - DNA, 548 bp, Artificial
  cDNA Sequence
gaccattttccaaccaacactgctggtccccaaacctgcactctagaagcaccactatagagcgtttccccttctaggaaggagatgggtcctccctgaaggggctgtgcaggggaggggatgatgggcattgatgggcattgtgactgcagtcctgcactgtggatctggctgggcaaacatagataggatggaggggtggggtgggccacgtgatacctcactctcttgtactgtgaactgtcacctgcagagcagagatgccgcaggcccggcccttagaaggcgcattcagccccatctccttcaagccaggcctccaccaggctgacatcaagctgaccgtgtggaaaaggctcttccggaaagttttgccagccccggagcctctcaagttggaccctgccactgcccacccactcctggagctctccaagggcaacacggtggtgcagtgcgggcttctggcccagcggcgagccagccagcctgagcgcttcgactacagcacctgcgtcctggccagccgcggcttctcctgcggccgc

SEQ ID NO: 2715 - DNA, 476 bp, Artificial
  cDNA Sequence
agcctcccagctgcctcgatttgtgcgtgtgaacactctcaagacctgctccgatgatgtagttgattatttcaagagacaaggtttctcctatcagggtcgggcttccagcctcgatgacttacgagccctcaaggggaagcattttctcctggaccccttgatgccggagctgctggtgtttcccgcccagacagatctgcatgaacacccactgtaccgggccggacacctcattctgcaggacagggccagctgtctcccagccatgctgctggaccccccgccaggctcccatgtcatcgatgcctgtgccgccccaggcaataagaccagtcacttggctgctcttctgaagaaccaagggaagatctttgcctttgacctggatgccaagcggctggcatccatggccacgctgctggcccgggctggcgtctcttgctgtgaactggctgaggaggacttcctggcgg

SEQ ID NO: 2716 - DNA, 1178 bp, Artificial
  cDNA Sequence
ttttgccacagagccgtaaaggcgcgcgggaacatggggctgtatgctgcagctgcaggcgtgttggccggcgtggagagccgccagggctctatcaaggggttggtgtactccagcaacttccagaacgtgaagcagctgtacgcgctggtgtgcgaaacgcagcgctactccgccgtgctggatgctgtgatcgccagcgccggcctcctccgtgcggagaagaagctgcggccgcacctggccaaggtgctagtgtatgagttgttgttgggaaagggctttcgagggggtgggggccgatggaaggctctgttgggccggcaccaggcgaggctcaaggctgagttggctcggctcaaggttcatcggggtgtgagccggaatgaggacctgttggaagtgggatccaggcctggtccagcctcccagctgcctcgatttgtgcgtgtgaacactctcaagacctgctccgatgatgtagttgattatttcaagagacaaggtttctcctatcagggtcgggcttccagcctcgatgacttacgagccctcaaggggaagcattttctcctggaccccttgatgccggagctgctggtgtttcccgcccagacagatctgcatgaacacccactgtaccgggccggacacctcattctgcaggacagggccagctgtctcccagccatgctgctggaccccccgccaggctcccatgtcatcgatgcctgtgccgccccaggcaataagaccagtcacttggctgctcttctgaagaaccaagggaagatctttgcctttgacctggatgccaagcggctggcatccatggccacgctgctggcccgggctggcgtctcttgctgtgaactggctgaggaggacttcctggcggtctccccctcggatccacgctaccatgaggtccactacatcctgctggatccttcctgcagtggctcgggtatgccgagcagacagctggaggagcccggggcaggcacacctagcccggtgcgtctgcatgccctggcagggttccagcagcgagccctgtgccacgcgctcactttcccttccctgcagcggctcgtctactccacgtgctccctctgccaggaggagaatgaagacgtggtgcgagatgcgctgcagcagaacccgggcgccttcag

SEQ ID NO: 2717 - DNA, 619 bp, Artificial
  cDNA Sequence
caggcgtgttggccggcgtggagagccgccagggctctatcaaggggttggtgtactccagcaacttccagaacgtgaagcagctgtacgcgctggtgtgcgaaacgcagcgctactccgccgtgctggatgctgtgatcgccagcgccggcctcctccgtgcggagaagaagctgcggccgcacctggccaaggttcatcggggtgtgagccggaatgaggacctgttggaagtgggatccaggcctggtccagcctcccagctgcctcgatttgtgcgtgtgaacactctcaagacctgctccgatgatgtagttgattatttcaagagacaaggtttctcctatcagggtcgggcttccagcctcgatgacttacgagccctcaaggggaagcattttctcctggaccccttgatgccggagctgctggtgtttcccgcccagacagatctgcatgaacacccactgtaccgggccggacacctcattctgcaggacagggccagctgtctcccagccatgctgctggaccccccgccaggctcccatgtcatcgatgcctgtgccgccccaggcaataagaccagtcacttggctgctcttctgaagaaccaagg

SEQ ID NO: 2718 - DNA, 151 bp, Artificial
  cDNA Sequence
atccagtgttacaaattctgcagcaggtgttgaagatcttaacatcgttcaagtgactgttccagataatgagaaggaaagattatcaagcattgaaaagattaaacagctaagagaacaagttaatgacctctttagccgaaaatttggt

SEQ ID NO: 2719 - DNA, 606 bp, Artificial
  cDNA Sequence
tccggacacagcaggatcccacccacagaaccgccaggtgcacagctgcatatcctcaggggaaaactcccctcccctgccaccttactgataggcttcacttcccagagaactttcccaatcctgtgcaatgcctgagtggtacattgtattctatgagaatggcgcccccgcctccagagttgtgcaacaagacttccatgaatcaaagcccatcgctggctgcctcctctagccctgcatagcccagaagctacaacctcagcccagattagcaggctgaggggtcaggaggctgtcactggagctgttgagctcatgaacacgccgaagttgctgcgctccagaaatgtggaagttggaatgaagagccaccactgctgccaccaacatgaagcttgaccaagcaagccaagaaaagatggccaagagcctctgccttccttctgccttctgcaacgcaatggtgagctgcacatccacaacttgaagggagtctgggaaatgcagagttaaactttctagcctctctaagctttcaactgttacagaaaggcaacccaggaggagactggaataaatgctgagtgccaatttccaacacaa

SEQ ID NO: 2720 - DNA, 697 bp, Artificial
  cDNA Sequence
ggcagtgacactgagcgggcgcagggggccgagtcggagaccgtgccggagttcgggagcggcaacagagtgggcatagacactccgagcagcctcgccgtcgtctctgcgttcctgttgactgcctggctgccccctcccctactcctcggttcctggtgaagaggctgcgcgctgctgtttggggagggggtgtgtggagccgggtcctgtgtccgcagtggctgctgtcggggggtcgcctgttcgcggaggtgcggagagactccttgggggtcgagcacataacggggttcgggtgtctcgtgtgtgaacatcacaggtctattctggataagcaggttttgtgaagacatttattctttcttggacctcagatttaccagacatctcatgggtttgtggatgcacttagatgtttgcaatgagcactgtggctggcatgccccagtgttttggataccaatgcataggactccatagtaatcgaatttaccagaggcgaacgtcatgagcatagtgatcccattgggggttgatacagcagagacgtcatacttggaaatggctgcaggttcagaaccagaatccgtagaagctagccctgtggtagttgagaaatccaacagttatccccaccagttatataccagcagctcacatcattcacacagttacattggtttgccctatgcgg

SEQ ID NO: 2721 - DNA, 624 bp, Artificial
  cDNA Sequence
ggcagtgacactgagcgggcgcagggggccgagtcggagaccgtgccggagttcgggagcggcaacagagtgggcatagacactccgagcagcctcgccgtcgtctctgcgttcctgttgactgcctggctgccccctcccctactcctcggttcctggtgaagaggctgcgcgctgctgtttggggagggggtgtgtggagccgggtcctgtgtccgcagtggctgctgtcggggggtcgcctgttcgcggaggtgcggagagactccttgggggtcgagcacataacggggttcgggtgtctcgtgtgtgaacatcacaggtctattctggataagcaggttttgtgaagacatttattctttcttggacctcagatttaccagacatctcatgggtttgtggatgcacttagatgtttgcaatgagcactgtggctggcatgccccagtgttttggataccaatgcataggactccatagtaatcgaatttaccagaggcgaacgtcatgagcatagtgatcccattgggggttgatacagcagagacgtcatacttggaaatggctgcaggttcagagtaagtatttaaattggttacataagcaaaaaaaaaaaaaaaa

SEQ ID NO: 2722 - DNA, 847 bp, Artificial
  cDNA Sequence
gtgtccgcagtggctgctgtcggggggtcgcctgttcgcggagggtttgtggatgcacttagatgtttgcaatgagcactgtggctggcatgccccagtgttttggataccaatgcataggactccatagtaatcgaatttaccagaggcgaacgtcatgagcatagtgatcccattgggggttgatacagcagagacgtcatacttggaaatggctgcaggttcagaaccagaatccgtagaagctagccctgtggtagttgagaaatccaacagttatccccaccagttatataccagcagctcacatcattcacacagttacattggtttgccctatgcggaccataattatggtgctcgtcctcctccgacacctccggcttcccctcctccatcagtccttattagcaaaaatgaagtaggcatatttaccactcctaattttgatgaaacttccagtgctactacaatcagcacatctgaggatggaagttatggtactgatgtaaccaggtgcatatgtggttttacacatgatgatggatacatgatctgttgtgacaaatgcagcgtttggcaacatattgactgcatggggattgataggcagcatattcctgatacatatctatgtgaacgttgtcagcctaggaatttggataaagagagggcagtgctactacaacgccggaaaagggaaaatatgtcagatggtgataccagtgcaactgagagtggtgatgaggttcctgtggaattatatactgcatttcagcatactccaacatcaattactttaactgcttcaagagtttccaaagttaatgataaaagaaggaaaaaa

SEQ ID NO: 2723 - DNA, 2508 bp, Artificial
  cDNA Sequence
ggaccataattatggtgctcgtcctcctccgacacctccggcttcccctcctccatcagtccttattagcaaaaatgaagtaggcatatttaccactcctaattttgatgaaacttccagtgctactacaatcagcacatctgaggatggaagttatggtactgatgtaaccaggtgcatatgtggttttacacatgatgatggatacatgatctgttgtgacaaatgcagcgtttggcaacatattgactgcatggggattgataggcagcatattcctgatacatatctatgtgaacgttgtcagcctaggaatttggataaagagagggcagtgctactacaacgccggaaaagggaaaatatgtcagatggtgataccagtgcaactgagagtggtgatgaggttcctgtggaattatatactgcatttcagcatactccaacatcaattactttaactgcttcaagagtttccaaagttaatgataaaagaaggaaaaaaagcggggagaaagaacaacacatttcaaaatgtaaaaaggcatttcgtgaaggatctaggaagtcatcaagatttatgattttagggttcagctccagagattgatccttcatctgatggttcaaattttggatgggagacaaagatcaaagcatggatggatcgatatgaagaagcaaataacaaccagtacagtgagggtgttcagagggaggcacaaagaatagctctgagattaggcaatggaaatgacaaaaaagagatgaataaatccgatttgaataccaacaatttgctcttcaaacctcctgtagagagccatatacaaaagaataagaaaattcttaaatctgcaaaagatttgcctcctgatgcacttatcattgaatacagagggaagtttatgctgagagaacagtttgaagcaaatgggtatttctttaaaagaccatacccttttgtgttattctactctaaatttcatgggctagaaatgtgtgttgatgcaaggacttttgggaatgaggctcgattcatcaggcggtcttgtacacccaatgcagaggtgaggcatgaaattcaagatggaaccatacatctttatatttattctatacacagtattccaaagggaactgaaattactattgcctttgattttgactatggaaattgtaagtacaaggtggactgtgcatgcctcaaagaaaacccagagtgccctgttctaaaacgtagttctgaatccatggaaaatatcaatagtggttatgagaccagacggaaaaaaggaaaaaaagacaaagatatttcaaaagaaaaagatacacaaaatcagaatattactttggattgtgaaggaacgaccaacaaaatgaagagcccagaaactaaacaaagaaagctttctccactgagactatcagtatcaaataatcagtcatttccatttttcaggaaccagattttattgatgatatagaagaaaaaactcctattagtaatgaagtagaaatggaatcagaggagcagattgcagaaaggaaaaggaagatgacaagagaagaaagaaaaatggaagcaattttgcaagcttttgccagacttgaaaagagagagaaaagaagagaacaagctttggaaaggatcagcacagccaaaactgaagttaaaactgaatgtaaagatacacagattgtcagtgatgctgaagttattcaggaacaagcaaaagaagaaaatgctagcaagccaacccctgccaaagtaaatagaactaaacagagaaaaagtttttctcggagtaggactcacattggacagcagcgtcggagacacagaactgtcagcatgtgttcagatatccagccatcttctcctgatatagaagttacttcacaacaaaatgatattgaaaatactgtacttacaatagaaccagaaactgaaactgcactagcagaaataattactgaaactgaagttccagcacttaataaatgtcctaccaagtaccccaaaacaaagaagcacttggttaatgaatggttaagtgagaagaatgagaagacaggaaaaccttcagatggcctttcagaaaggcctctacgcataactacagatcctgaagtgttagctacacaactcaattctttaccaggtctcacttacagcccccatgtatactccactcctaagcattatattagatttacttcaccattcctttcagaaaaaaggagaagaaaagaacctactgaaaacatttctggttcatgcaagaagcgatggttgaaacaagctctggaagaagaaaattcagcaattttacatagatttaattcaccctgtcaagaaagatccagaagtcctgcagtcaatggtgaaaataaaagtccactactattaaatgacagctgttcccttccagatttaactacaccactaaaaaaacgaagattttatcagttgctagattcggtttactcagaaacctccacacc

SEQ ID NO: 2724 - DNA, 2490 bp, Artificial
  cDNA Sequence
ggaccataattatggtgctcgtcctcctccgacacctccggcttcccctcctccatcagtccttattagcaaaaatgaagtaggcatatttaccactcctaattttgatgaaacttccagtgctactacaatcagcacatctgaggatggaagttatggtactgatgtaaccaggtgcatatgtggttttacacatgatgatggatacatgatctgttgtgacaaatgcagcgtttggcaacatattgactgcatggggattgataggcagcatattcctgatacatatctatgtgaacgttgtcagcctaggaatttggataaagagagggcagtgctactacaacgccggaaaagggaaaatatgtcagatggtgataccagtgcaactgagagtggtgatgaggttcctgtggaattatatactgcatttcagcatactccaacatcaattactttaactgcttcaagagtttccaaagttaatgataaaagaaggaaaaaaagcggggagaaagaacaacacatttcaaaatgtaaaaaggcatttcgtgaaggatctaggaagtcatcaagatttatgattttagggttcagctccagagattgatccttcatctgatggttcaaattttggatgggagacaaagatcaaagcatggatggatcgatatgaagaagcaaataacaaccagtacagtgagggtgttcagagggaggcacaaagaatagctctgagattaggcaatggaaatgacaaaaaagagatgaataaatccgatttgaataccaacaatttgctcttcaaacctcctgtagagagccatatacaaaagaataagaaaattcttaaatctgcaaaagatttgcctcctgatgcacttatcattgaatacagagggaagtttatgctgagagaacagtttgaagcaaatgggtatttctttaaaagaccatacccttttgtgttattctactctaaatttcatgggctagaaatgtgtgttgatgcaaggacttttgggaatgaggctcgattcatcaggcggtcttgtacacccaatgcagaggtgaggcatgaaattcaagatggaaccatacatctttatatttattctatacacagtattccaaagggaactgaaattactattgcctttgattttgactatggaaattgtaagtacaaggtggactgtgcatgcctcaaagaaaacccagagtgccctgttctaaaacgtagttctgaatccatggaaaatatcaatagtggttatgagaccagacggaaaaaaggaaaaaaagacaaagatatttcaaaagaaaaagatacacaaaatcagaatattactttggattgtgaaggaacgaccaacaaaatgaagagcccagaaactaaacaaagaaagctttctccactgagactatcagtatcaaataatcagtcatttccatttttcaggaaccagattttattgatgatatagaagaaaaaactcctattagtaatgaagtagaaatggaatcagaggagcagattgcagaaaggaaaaggaagatgacaagagaagaaagaaaaatggaagcaattttgcaagcttttgccagacttgaaaagagagagaaaagaagagaacaagctttggaaaggatcagcacagccaaaactgaagttaaaactgaatgtaaagatacacagattgtcagtgatgctgaagttattcaggaacaagcaaaagaagaaaatgctagcaagccaacccctgccaaagtaaatagaactaaacagagaaaaagtttttctcggagtaggactcacattggacagcagcgtcggagacacagaactgtcagcatgtgttcagatatccagccatcttctcctgatatagaagttacttcacaacaaaatgatattgaaaatactgtacttacaatagaaccagaaactgaaactgcactagcagaaataattactgaaactgaagttccagcacttaataaatgtcctaccaagtaccccaaaacaaagaaggtatgattctaatgaatgtaagaactgtttttctaacagtttcttatattaattatattgttgttttaaaaattggatttttaagacctcataataataagaggcagtttttatacttgcagattttaaaactaagaatgagaattccaaaactgtaaaattaatataaatgtttgcattactgtgaagataaagttacattcagtttatcaggacttttatggtattgcaattcatgatttctttaaataagtttgtctactttatgtacaaaatatatacttctctgaaactggttttagatgtgttatcctttatatttttataaatttcattgtataggtagattataagaattaaatgtgaagaaattgatttccacagaatgtactatgaaaatttgtaagaaagagtagttttaggtgtaattattaataaaaatctctgaaacacta

SEQ ID NO: 2725 - DNA, 463 bp, Artificial
  cDNA Sequence
atgtatcctatatttatcctcttgcttttgcatctcaaaattttatcgccttgaagacacgtttctatgaatttctcagagtaccttttaggagtactaagctcaaagtaggtgcttattaaatgatagttaaatggaatatcaaatcttaatttaaggatgacttaaataatattacatatgttctgcttttttttttttaagcgtttggcaacatattgactgcatggggattgataggcagcatattcctgatacatatctatgtgaacgttgtcagcctaggaatttggataaagagagggcagtgctactacaacgccggaaaagggaaaatatgtcagatggtgataccagtgcaactgagagtggtgatgaggttcctgtggaattatatactgcatttcagcatactccaacatcaattactttaactgcttcaagagtttccaaagttaatgat

SEQ ID NO: 2726 - DNA, 476 bp, Artificial
  cDNA Sequence
agagccatatacaaaagaataagaaaattcttaaatctgcaaaagatttgcctcctgatgcacttatcattgaatacagagggaagtttatgctgagagaacagtttgaagcaaatgggtatttctttaaaagaccatacccttttgtgttattctactctaaatttcatgggctagaaatgtgtgttgatgcaaggacttttgggaatgaggctcgattcatcaggcggtcttgtacacccaatgcagaggtgaggcatgaaattcaagatggaaccatacatctttatatttattctatacacagtattccaaagggaactgaaattactattgcctttgattttgactatggaaattgtaagtacaaggtggactgtgcatgcctcaaagaaaacccagagtgccctgttctaaaacgtagttctgaatccatggaaaatatcaatagtggttatgagaccagacggaaaaaa

SEQ ID NO: 2727 - DNA, 342 bp, Artificial
  cDNA Sequence
agaccatacccttttgtgttattctactctaaatttcatgggctagaaatgtgtgttgatgcaaggacttttgggaatgaggctcgattcatcaggcggtcttgtacacccaatgcagaggtgaggcatgaaattcaagatggaaccatacatctttatatttattctatacacagtattccaaagggaactgaaattactattgcctttgattttgactatggaaattgtaagtacaaggtggactgtgcatgcctcaaagaaaacccagagtgccctgttctaaaacgtagttctgaatccatggaaaatatcaatagtggttatgagaccagacggaaa

SEQ ID NO: 2728 - DNA, 1086 bp, Artificial
  cDNA Sequence
ttattcaggtattatttattcaggtcgttttattttcttaaacactttaaaataaaatgtctatacttgcattaattacttataaggaatttaaaataatgtctattagctttttaatagcatttttcagatcctatgggagtttcagcttgagataaaagactatatattatctctgttctttattatatatcagaattcaaaaattccagaaagttggcttctgaagtagaataatgctattatatttaaactttatatatatgtagtataaaaacttccattcgcttgtattttgaattaggaacaagcaaaagaagaaaatgctagcaagccaacccctgccaaagtaaatagaactaaacagagaaaaagtttttctcggagtaggactcacattggacagcagcgtcggagacacagaactgtcagcatgtgttcagatatccagccatcttctcctgatatagaagttacttcacaacaaaatgatattgaaaatactgtacttacaatagaaccagaaactgaaactgcactagcagaaataattactgaaactgaagttccagcacttaataaatgtcctaccaagtaccccaaaacaaagaagcacttggttaatgaatggttaagtgagaagaatgagaagacaggaaaaccttcagatggcctttcagaaaggcctctacgcataactacagatcctgaagtgttagctacacaactcaattctttaccaggtctcacttacagcccccatgtatactccactcctaagcattatattagatttacttcaccattcctttcagaaaaaaggagaagaaaagaacctactgaaaacatttctggttcatgcaagaagcgatggttgaaacaagctctggaagaagaaaattcagcaattttacatagatttaattcaccctgtcaagaaagatccagaagtcctgcagtcaatggtgaaaataaaagtccactactattaaatgacagctgttcccttccagatttaactacaccactaaaaaaacgaagattttatcagttgctagattcggtttactcagaaacctccacacc

SEQ ID NO: 2729 - DNA, 1136 bp, Artificial
  cDNA Sequence
cagagcgagaggcagtgacactgagcgggcgcagggggccgagtcggagaccgtgccggagttcgggagcggcaacagagtgggcatagacactccgagcagcctcgccgtcgtctctgcgttcctgttgactgcctggctgccccctcccctactcctcggttcctggtgaagaggctgcgcgctgctgtttggggagggggtgtgtggagccgggtcctgtgtccgcagtggctgctgtcggggggtcgcctgttcgcggaggtgcggagagactccttgggggtcgagcacataacggggttcgggtgtctcgtgtgtgaacatcacagggtttgtggatgcacttagatgtttgcaatgagcactgtggctggcatgccccagtgttttggataccaatgcataggactccatagtaatcgaatttaccagaggcgaacgtcatgagcatagtgatcccattgggggttgatacagcagagacgtcatacttggaaatggctgcaggttcagaaccagaatccgtagaagctagccctgtggtagttgagaaatccaacagttatccccaccagttatataccagcagctcacatcattcacacagttacattggtttgccctatgcggaccataattatggtgctcgtcctcctccgacacctccggcttcccctcctccatcagtccttattagcaaaaatgaagtaggcatatttaccactcctaattttgatgaaacttccagtgctactacaatcagcacatctgaggatggaagttatggtactgatgtaaccaggtgcatatgtggttttacacatgatgatggatacatgatctgttgtgacaaatgcagcgtttggcaacatattgactgcatggggattgataggcagcatattcctgatacatatctatgtgaacgttgtcagcctaggaatttggataaagagagggcagtgctactacaacgccggaaaagggaaaatatgtcagatggtgataccagtgcaactgagagtggtgatgaggttcctgtggaattatatactgcatttcagcatactccaacatcaattactttaactgcttcaagagtttccaaagttaatgataaaagaaggaaaaaa

SEQ ID NO: 2730 - DNA, 1136 bp, Artificial; identical to SEQ ID NO: 2729
  cDNA Sequence

SEQ ID NO: 2731 - DNA, 1312 bp, Artificial
  cDNA Sequence
cagagcgagaggcagtgacactgagcgggcgcagggggccgagtcggagaccgtgccggagttcgggagcggcaacagagtgggcatagacactccgagcagcctcgccgtcgtctctgcgttcctgttgactgcctggctgccccctcccctactcctcggttcctggtgaagaggctgcgcgctgctgtttggggagggggtgtgtggagccgggtcctgtgtccgcagtggctgctgtcggggggtcgcctgttcgcggaggtgcggagagactccttgggggtcgagcacataacggggttcgggtgtctcgtgtgtgaacatcacagggtttgtggatgcacttagatgtttgcaatgagcactgtggctggcatgccccagtgttttggataccaatgcataggactccatagtaatcgaatttaccagaggcgaacgtcatgagcatagtgatcccattgggggttgatacagcagagacgtcatacttggaaatggctgcaggttcagaaccagaatccgtagaagctagccctgtggtagttgagaaatccaacagttatccccaccagttatataccagcagctcacatcattcacacagttacattggtttgccctatgcggaccataattatggtgctcgtcctcctccgacacctccggcttcccctcctccatcagtccttattagcaaaaatgaagtaggcatatttaccactcctaattttgatgaaacttccagtgctactacaatcagcacatctgaggatggaagttatggtactgatgtaaccaggtgcatatgtggttttacacatgatgatggatacatgatctgttgtgacaaatgcaggtaaaatattttacaccattattttatttttcttgaatgctgataacctttggtaatgttggaaaagataactaaagtcactttcaagggaattaatggatacatattttaagtgggacttctactattgatgcagtcctagaaaaagcctcctatgtgaaaaaagagtttactagaaatccctgttgttaactgagtaatagacagtcagttctgaactttttttcatgtaggatcacatttttctgttcacttagttcaatagtagtacaagtacataaacatagcagtagacaagatagaaatgagagaatttagtcttttgtatttcctttggaataatttgtgcttagtcaactgtgattttccagtttgcggaaattaaacattttcattgatgtttgtttgacctgactctctcacctccttttgacttgaaccttgcagcac

SEQ ID NO: 2732 - DNA, 1312 bp, Artificial; identical to SEQ ID NO: 2731
  cDNA Sequence

SEQ ID NO: 2733 - DNA, 633 bp, Artificial
  cDNA Sequence
cagagcgagaggcagtgacactgagcgggcgcagggggccgagtcggagaccgtgccggagttcgggagcggcaacagagtgggcatagacactccgagcagcctcgccgtcgtctctgcgttcctgttgactgcctggctgccccctcccctactcctcggttcctggtgaagaggctgcgcgctgctgtttggggagggggtgtgtggagccgggtcctgtgtccgcagtggctgctgtcggggggtcgcctgttcgcggaggtgcggagagactccttgggggtcgagcacataacggggttcgggtgtctcgtgtgtgaacatcacagggtttgtggatgcacttagatgtttgcaatgagcactgtggctggcatgccccagtgttttggataccaatgcataggactccatagtaatcgaatttaccagaggcgaacgtcatgagcatagtgatcccattgggggttgatacagcagagacgtcatacttggaaatggctgcaggttcagaaccagaatccgtagaagctagccctgtggtagttgagaaatccaacagttatccccaccagttatataccagcagctcacatcattcacacagttacattggtttgccctatgcgg

SEQ ID NO: 2734 - DNA, 560 bp, Artificial
  cDNA Sequence
cagagcgagaggcagtgacactgagcgggcgcagggggccgagtcggagaccgtgccggagttcgggagcggcaacagagtgggcatagacactccgagcagcctcgccgtcgtctctgcgttcctgttgactgcctggctgccccctcccctactcctcggttcctggtgaagaggctgcgcgctgctgtttggggagggggtgtgtggagccgggtcctgtgtccgcagtggctgctgtcggggggtcgcctgttcgcggaggtgcggagagactccttgggggtcgagcacataacggggttcgggtgtctcgtgtgtgaacatcacagggtttgtggatgcacttagatgtttgcaatgagcactgtggctggcatgccccagtgttttggataccaatgcataggactccatagtaatcgaatttaccagaggcgaacgtcatgagcatagtgatcccattgggggttgatacagcagagacgtcatacttggaaatggctgcaggttcagagtaagtatttaaattggttacataagcaaaaaaaaaaaaaaaa

SEQ ID NO: 2735 - DNA, 1200 bp, Artificial
  cDNA Sequence
ggcagtgacactgagcgggcgcagggggccgagtcggagaccgtgccggagttcgggagcggcaacagagtgggcatagacactccgagcagcctcgccgtcgtctctgcgttcctgttgactgcctggctgccccctcccctactcctcggttcctggtgaagaggctgcgcgctgctgtttggggagggggtgtgtggagccgggtcctgtgtccgcagtggctgctgtcggggggtcgcctgttcgcggaggtgcggagagactccttgggggtcgagcacataacggggttcgggtgtctcgtgtgtgaacatcacaggtctattctggataagcaggttttgtgaagacatttattctttcttggacctcagatttaccagacatctcatgggtttgtggatgcacttagatgtttgcaatgagcactgtggctggcatgccccagtgttttggataccaatgcataggactccatagtaatcgaatttaccagaggcgaacgtcatgagcatagtgatcccattgggggttgatacagcagagacgtcatacttggaaatggctgcaggttcagaaccagaatccgtagaagctagccctgtggtagttgagaaatccaacagttatccccaccagttatataccagcagctcacatcattcacacagttacattggtttgccctatgcggaccataattatggtgctcgtcctcctccgacacctccggcttcccctcctccatcagtccttattagcaaaaatgaagtaggcatatttaccactcctaattttgatgaaacttccagtgctactacaatcagcacatctgaggatggaagttatggtactgatgtaaccaggtgcatatgtggttttacacatgatgatggatacatgatctgttgtgacaaatgcagcgtttggcaacatattgactgcatggggattgataggcagcatattcctgatacatatctatgtgaacgttgtcagcctaggaatttggataaagagagggcagtgctactacaacgccggaaaagggaaaatatgtcagatggtgataccagtgcaactgagagtggtgatgaggttcctgtggaattatatactgcatttcagcatactccaacatcaattactttaactgcttcaagagtttccaaagttaatgataaaagaaggaaaaaa

SEQ ID NO: 2736 - DNA, 3125 bp, Artificial
  cDNA Sequence
tataaacccatatattcaccagttaccccagtaactcctggtacaccaggaaataccatgcactttgagaatatttcttccccagaaagttctccagaaataaagagacgcacttatagtcaagagggatatgacagatcttcaaccatgttaacattggggccttttagaaattctaatttaactgaactgggtctgcaagaaataaagactattggttatacgagccctaggagtaggactgaagtcaacaggcagtgtcctggagaaaaggaacctgtgtcagaccttcagctaggactcgatgcagttgagccaactgccctacataaaaccctggaaacgcctgcacatgacagggctgagcccaacagccaactggactcgactcactctggacggggcacaatgtattcttcctgggtaaagagccctgacagaacaggagttaacttctcagtgaactccaacttgagggacctgacaccctcgcatcagttggaggttggaggaggcttccgaataagtgagtcaaagtgcctgatgcaggatgatactagaggcatgtttatggaaacaactgtgttttgtacttccgaagatgggcttgtatctggtttcggacggactgttaatgacaatttgatcgacgggaattgcacaccccagaatccaccacaaaagaaaaaggtttctctattagaataccgtaagagacaacgtgaagctaggaaaagtggctctaagacagagaactttccactcattagtgtatcaccccatgcaagtggaagcttgagcaacaatggtgatggctgtgccagcagtaatgacaatggggagcaggtggaccacactgctagcctacctttaccaacaccagctacagtttataatgccacttctgaagaaactagcaataactgccctgttaaggatgctactgctagtgagaagaatgaaccagaagttcaatggactgcctcaacttcagtggaacaagtcagagaaaggagttatcagagagctttacttctcagtgatcaccgaaaagataaagatagtgggggagaatcaccatgtgtctcatgttcaccgagtcatgttcagtcttcaccttcatctcattcaaatcacataccccagttgcaagctaagggcccagtcccttctttcagtgaacttatggaagaccctgatcctgaaaatccagaacccacaactacgaatgaatgtccatccccagatacttctcaaaatacttgtaaaagtcctccaaaaatgagcaaggtaataacattgacctttcgatgggttccaaaggactttaggttgagtgcagaaaagctgatggttataatatgcagtgtttttctgctgtatcaagtatcaacttgtgacttctggacacttttcctgtcagaaatactcaattgtgtttactactgtttgttcttcttactgaacatgtgatggataactctgaccaaacattcaagttttctaagcacacttcaacagcttacattttcttcaaatgttccacctctattctagtggtgtccaggaaattcatagccttgtcatgaaattcttaaccatccaattatctaaaaacaaaaggtcattttatcatttaaaaggaatgacatcttcatcctggttcatgaagatgtaataatctagtatggcatgtaaatcattggaaactaaagacaaggaatgtgagatttatctttttttgatgattgacatttaaacagtcttatacttggtttatttatatctgaacagtgtacaaggaaaatgaaaaggtattaaaaatcaaaatggtttgagggagcaagttcatttacccaaatcaatttatccttaggttgggtatagaaatttcaattataaaattgaaacttgctattggagttcttcagagtgaggctcaaaaacaggtttcattgcttaggggtaaaaaggcagagtaaagtgaaagaaaattatttcctcaacttgtcttcaataaaaattaacccagagaattcactttaagctcacgctcataactttttggaacaactgaaaaatattggccttttaacatcccaagcctccataattgacgtatccaggatgttatttcctgccccccattaaaattaatatttaggtagtattaaataccaacaagaataaacctcaaggtacacaaaatgttccttgaatgtatataatttgttttctcttcatagcctggttcacctggatctgtaattcctgctcaagcacacgggaaaatattcacaaaaccagatccccaatgggactccacagttagtgcatccgaagctgaaaatggtgttcacctaaaaacagagctccaacaaaaacagctatcaaataacaaccaagcactttcaaagaatcatcctcctcagacacacgttcgtaattcatctgagcaactttcacaaaagctgccttctgtgccaacaaagttgcactgtcctccatcacctcacctagaaaatcctccaaagtcatccacgcctcacacacctgtacagcatggttatctttcaccaaagcctccttcacagcagttaggatctccctacaggcctcatcattcacagtcacctcaagttggaacacctcagcgagagcctcaaagaaacttttatccagcagcacagaaccttccagccaatactcagcaggcaacttctggaacattatttacacagacaccctcaggacaatcttcagcaacatacagtcagtttaaccaacaaagtctgaacagcacggcaccaccccctccacctcctccacctccttcttcgtcttactatcaaaaccagcagccctctgcaaactttcagaattataatcagctcaaaggtagtctttctcaacaaactgtgtttacatcaggaccaaatcaagcacttcctggcaccacaagccagcaaacagttccaggacaccacgtgactccagggcattttttgccctctcagaaccctaccattcaccatcaaactgctgctgccgtagtcccccctcctcctccaccaccacctgctccaggaccgcaccttgtacaacagccgaattcccatcagcaa

SEQ ID NO: 2737 - DNA, 1265 bp, Artificial
  cDNA Sequence
tataaacccatatattcaccagttaccccagtaactcctggtacaccaggaaataccatgcactttgagaatatttcttccccagaaagttctccagaaataaagagacgcacttatagtcaagagggatatgacagatcttcaaccatgttaacattggggccttttagaaattctaatttaactgaactgggtctgcaagaaataaagactattggttatacgagccctaggagtaggactgaagtcaacaggcagtgtcctggagaaaaggaacctgtgtcagaccttcagctaggactcgatgcagttgagccaactgccctacataaaaccctggaaacgcctgcacatgacagggctgagcccaacagccaactggactcgactcactctggacggggcacaatgtattcttcctgggtaaagagccctgacagaacaggagttaacttctcagtgaactccaacttgagggacctgacaccctcgcatcagttggaggttggaggaggcttccgaataagtgagtcaaagtgcctgatgcaggatgatactagaggcatgtttatggaaacaactgtgttttgtacttccgaagatgggcttgtatctggtttcggacggactgttaatgacaatttgatcgacgggaattgcacaccccagaatccaccacaaaagaaaaaggtttctctattagaataccgtaagagacaacgtgaagctaggaaaagtggctctaagacagagaactttccactcattagtgtatcaccccatgcaagtggaagcttgagcaacaatggtgatggctgtgccagcagtaatgacaatggggagcaggtggaccacactgctagcctacctttaccaacaccagctacagtttataatgccacttctgaagaaactagcaataactgccctgttaaggatgctactgctagtgagaagaatgaaccagaagttcaatggtaagcccattgtgaagtatgctactctggaaaaaacaagcttttgttcaagtattcttcctatttgttgttctcccaaggctaagctgatagtgcttcgtggtcacaattttaaaagattctctctgctaataggattttaagccagctgtgtatggcctgtgttcttaaatgtcgattgtatttattccttggtaatttattcatactttacacacacatatcctctccaaagaatttttatcagattcaacaattctgcagacttcctttataacccctaccagt

SEQ ID NO: 2738 - DNA, 3203 bp, Artificial
  cDNA Sequence
atatacagaatatttcttccccagaaagttctccagaaataaagagacgcacttatagtcaagaggtaagaagttaacttaaaaagggtgaattggtagtttttttcctattacattgttttccttaaattactggtaaattttgaaataaacagtcccaagatgtgattatttgtgtaatttttttttttaatttgtaaacagggatatgacagatcttcaaccatgttaacattggggccttttagaaattctaatttaactgaactgggtctgcaagaaataaagactattggttatacgagccctaggagtaggactgaagtcaacaggcagtgtcctggagaaaaggaacctgtgtcagaccttcagctaggactcgatgcagttgagccaactgccctacataaaaccctggaaacgcctgcacatgacagggctgagcccaacagccaactggactcgactcactctggacggggcacaatgtattcttcctgggtaaagagccctgacagaacaggagttaacttctcagtgaactccaacttgagggacctgacaccctcgcatcagttggaggttggaggaggcttccgaataagtgagtcaaagtgcctgatgcaggatgatactagaggcatgtttatggaaacaactgtgttttgtacttccgaagatgggcttgtatctggtttcggacggactgttaatgacaatttgatcgacgggaattgcacaccccagaatccaccacaaaagaaaaaggtttctctattagaataccgtaagagacaacgtgaagctaggaaaagtggctctaagacagagaactttccactcattagtgtatcaccccatgcaagtggaagcttgagcaacaatggtgatggctgtgccagcagtaatgacaatggggagcaggtggaccacactgctagcctacctttaccaacaccagctacagtttataatgccacttctgaagaaactagcaataactgccctgttaaggatgctactgctagtgagaagaatgaaccagaagttcaatggactgcctcaacttcagtggaacaagtcagagaaaggagttatcagagagctttacttctcagtgatcaccgaaaagataaagatagtgggggagaatcaccatgtgtctcatgttcaccgagtcatgttcagtcttcaccttcatctcattcaaatcacataccccagttgcaagctaagggcccagtcccttctttcagtgaacttatggaagaccctgatcctgaaaatccagaacccacaactacgaatgaatgtccatccccagatacttctcaaaatacttgtaaaagtcctccaaaaatgagcaaggtaataacattgacctttcgatgggttccaaaggactttaggttgagtgcagaaaagctgatggttataatatgcagtgtttttctgctgtatcaagtatcaacttgtgacttctggacacttttcctgtcagaaatactcaattgtgtttactactgtttgttcttcttactgaacatgtgatggataactctgaccaaacattcaagttttctaagcacacttcaacagcttacattttcttcaaatgttccacctctattctagtggtgtccaggaaattcatagccttgtcatgaaattcttaaccatccaattatctaaaaacaaaaggtcattttatcatttaaaaggaatgacatcttcatcctggttcatgaagatgtaataatctagtatggcatgtaaatcattggaaactaaagacaaggaatgtgagatttatctttttttgatgattgacatttaaacagtcttatacttggtttatttatatctgaacagtgtacaaggaaaatgaaaaggtattaaaaatcaaaatggtttgagggagcaagttcatttacccaaatcaatttatccttaggttgggtatagaaatttcaattataaaattgaaacttgctattggagttcttcagagtgaggctcaaaaacaggtttcattgcttaggggtaaaaaggcagagtaaagtgaaagaaaattatttcctcaacttgtcttcaataaaaattaacccagagaattcactttaagctcacgctcataactttttggaacaactgaaaaatattggccttttaacatcccaagcctccataattgacgtatccaggatgttatttcctgccccccattaaaattaatatttaggtagtattaaataccaacaagaataaacctcaaggtacacaaaatgttccttgaatgtatataatttgttttctcttcatagcctggttcacctggatctgtaattcctgctcaagcacacgggaaaatattcacaaaaccagatccccaatgggactccacagttagtgcatccgaagctgaaaatggtgttcacctaaaaacagagctccaacaaaaacagctatcaaataacaaccaagcactttcaaagaatcatcctcctcagacacacgttcgtaattcatctgagcaactttcacaaaagctgccttctgtgccaacaaagttgcactgtcctccatcacctcacctagaaaatcctccaaagtcatccacgcctcacacacctgtacagcatggttatctttcaccaaagcctccttcacagcagttaggatctccctacaggcctcatcattcacagtcacctcaagttggaacacctcagcgagagcctcaaagaaacttttatccagcagcacagaaccttccagccaatactcagcaggcaacttctggaacattatttacacagacaccctcaggacaatcttcagcaacatacagtcagtttaaccaacaaagtctgaacagcacggcaccaccccctccacctcctccacctccttcttcgtcttactatcaaaaccagcagccctctgcaaactttcagaattataatcagctcaaaggtagtctttctcaacaaactgtgtttacatcaggaccaaatcaagcacttcctggcaccacaagccagcaaacagttccaggacaccacgtgactccagggcattttttgccctctcagaaccctaccattcaccatcaaactgctgctgccgtagtcccccctcctcctccaccaccacctgctccaggaccgcaccttgtacaacagccgaattcccatcagcaa

SEQ ID NO: 2739 - DNA, 1343 bp, Artificial
  cDNA Sequence
atatacagaatatttcttccccagaaagttctccagaaataaagagacgcacttatagtcaagaggtaagaagttaacttaaaaagggtgaattggtagtttttttcctattacattgttttccttaaattactggtaaattttgaaataaacagtcccaagatgtgattatttgtgtaatttttttttttaatttgtaaacagggatatgacagatcttcaaccatgttaacattggggccttttagaaattctaatttaactgaactgggtctgcaagaaataaagactattggttatacgagccctaggagtaggactgaagtcaacaggcagtgtcctggagaaaaggaacctgtgtcagaccttcagctaggactcgatgcagttgagccaactgccctacataaaaccctggaaacgcctgcacatgacagggctgagcccaacagccaactggactcgactcactctggacggggcacaatgtattcttcctgggtaaagagccctgacagaacaggagttaacttctcagtgaactccaacttgagggacctgacaccctcgcatcagttggaggttggaggaggcttccgaataagtgagtcaaagtgcctgatgcaggatgatactagaggcatgtttatggaaacaactgtgttttgtacttccgaagatgggcttgtatctggtttcggacggactgttaatgacaatttgatcgacgggaattgcacaccccagaatccaccacaaaagaaaaaggtttctctattagaataccgtaagagacaacgtgaagctaggaaaagtggctctaagacagagaactttccactcattagtgtatcaccccatgcaagtggaagcttgagcaacaatggtgatggctgtgccagcagtaatgacaatggggagcaggtggaccacactgctagcctacctttaccaacaccagctacagtttataatgccacttctgaagaaactagcaataactgccctgttaaggatgctactgctagtgagaagaatgaaccagaagttcaatggtaagcccattgtgaagtatgctactctggaaaaaacaagcttttgttcaagtattcttcctatttgttgttctcccaaggctaagctgatagtgcttcgtggtcacaattttaaaagattctctctgctaataggattttaagccagctgtgtatggcctgtgttcttaaatgtcgattgtatttattccttggtaatttattcatactttacacacacatatcctctccaaagaatttttatcagattcaacaattctgcagacttcctttataacccctaccagt

SEQ ID NO: 2740 - DNA, 3416 bp, Artificial
  cDNA Sequence
tttttttttttttttcataatactactgaggggaattgttagatgtattatgtaaggcattcttaatttagttattaaagttacatttttaatatttttaaaccttttgtaaatgctggcttaattagaaaatgtttacagaaaagtaaaaaaattctagtaatatgggaaatccttgtaagcagcatggtttcagaaaaatctcaagatgatttatttcaccaaatgagtattttttaaaactaggaactccccaaccaaaaacacagacttgaataatatttgtgttattacctttattgtacattgagcaagcacccttgtatagaggaaatgcctctttcctcatctataatatctatagtatttaggccatggatgtaagagtgtttttattttactaatagttaatgtattaaatattaagttagttccctgatttcccattatttggttggcagacatactgagataattagaatgccttatttcaaaagaaactatagcacttattttgttagtaggcttattgctttgcaagtccaagaattttcgtgatgtgtgcttttaatttttataacagagtccagttggcaactttgtgggaagcaatgtagtatagtggaaagagcacgggctttcaagtaagacctaggttcgaatcccggctccaacactcaccagctgtgtgaccttgagtgagtgagttactcaatttcctcatctataaaatggggatgataatatacctatttcatagggttgttgtgaggataaatgagataatgtatgtaaatcatctaagtacaatgcctggaatatagtaggcatttggtaattgttaattatttgttcagaatcaattaaaataattttcctaatgtaaatatagtaattctctttagacaaaaaagaatgcattggttctgacataaaaaacaagaataaaagatttgctttttctcatctttcttgcttaaggtttctctattagaataccgtaagagacaacgtgaagctaggaaaagtggctctaagacagagaactttccactcattagtgtatcaccccatgcaagtggaagcttgagcaacaatggtgatggctgtgccagcagtaatgacaatggggagcaggtggaccacactgctagcctacctttaccaacaccagctacagtttataatgccacttctgaagaaactagcaataactgccctgttaaggatgctactgctagtgagaagaatgaaccagaagttcaatggactgcctcaacttcagtggaacaagtcagagaaaggagttatcagagagctttacttctcagtgatcaccgaaaagataaagatagtgggggagaatcaccatgtgtctcatgttcaccgagtcatgttcagtcttcaccttcatctcattcaaatcacataccccagttgcaagctaagggcccagtcccttctttcagtgaacttatggaagaccctgatcctgaaaatccagaacccacaactacgaatgaatgtccatccccagatacttctcaaaatacttgtaaaagtcctccaaaaatgagcaaggtaataacattgacctttcgatgggttccaaaggactttaggttgagtgcagaaaagctgatggttataatatgcagtgtttttctgctgtatcaagtatcaacttgtgacttctggacacttttcctgtcagaaatactcaattgtgtttactactgtttgttcttcttactgaacatgtgatggataactctgaccaaacattcaagttttctaagcacacttcaacagcttacattttcttcaaatgttccacctctattctagtggtgtccaggaaattcatagccttgtcatgaaattcttaaccatccaattatctaaaaacaaaaggtcattttatcatttaaaaggaatgacatcttcatcctggttcatgaagatgtaataatctagtatggcatgtaaatcattggaaactaaagacaaggaatgtgagatttatctttttttgatgattgacatttaaacagtcttatacttggtttatttatatctgaacagtgtacaaggaaaatgaaaaggtattaaaaatcaaaatggtttgagggagcaagttcatttacccaaatcaatttatccttaggttgggtatagaaatttcaattataaaattgaaacttgctattggagttcttcagagtgaggctcaaaaacaggtttcattgcttaggggtaaaaaggcagagtaaagtgaaagaaaattatttcctcaacttgtcttcaataaaaattaacccagagaattcactttaagctcacgctcataactttttggaacaactgaaaaatattggccttttaacatcccaagcctccataattgacgtatccaggatgttatttcctgccccccattaaaattaatatttaggtagtattaaataccaacaagaataaacctcaaggtacacaaaatgttccttgaatgtatataatttgttttctcttcatagcctggttcacctggatctgtaattcctgctcaagcacacgggaaaatattcacaaaaccagatccccaatgggactccacagttagtgcatccgaagctgaaaatggtgttcacctaaaaacagagctccaacaaaaacagctatcaaataacaaccaagcactttcaaagaatcatcctcctcagacacacgttcgtaattcatctgagcaactttcacaaaagctgccttctgtgccaacaaagttgcactgtcctccatcacctcacctagaaaatcctccaaagtcatccacgcctcacacacctgtacagcatggttatctttcaccaaagcctccttcacagcagttaggatctccctacaggcctcatcattcacagtcacctcaagttggaacacctcagcgagagcctcaaagaaacttttatccagcagcacagaaccttccagccaatactcagcaggcaacttctggaacattatttacacagacaccctcaggacaatcttcagcaacatacagtcagtttaaccaacaaagtctgaacagcacggcaccaccccctccacctcctccacctccttcttcgtcttactatcaaaaccagcagccctctgcaaactttcagaattataatcagctcaaaggtagtctttctcaacaaactgtgtttacatcaggaccaaatcaagcacttcctggcaccacaagccagcaaacagttccaggacaccacgtgactccagggcattttttgccctctcagaaccctaccattcaccatcaaactgctgctgccgtagtcccccctcctcctccaccaccacctgctccaggaccgcaccttgtacaacagccgaattcccatcagcaa

SEQ ID NO: 2741 - DNA, 2250 bp, Artificial
  cDNA Sequence
gagacatcgagaggaagtcgctgtggcactcagtcctacggcctccgaggctgggtagtgagtgtgtcgctggccttagccagactccacaggccacgctggctgcgaatggagccgaggactcgcgcggaggcgagatgctaccagccggcgagatcggcgcctctcctgcagccccgtgctgctctgaaagtggtgacgaaaggaagaacctcgaggagaaaagtgacataaatgttacagttcttattggaagtaaacaagtcagtgaaggtacagataatggtgatctcccttcttatgtgtctgcattcatagaaaaggaagttggaaatgaccttaaatctttaaagaaacttgataaactcatagaacagaggacagtaagtaaaatgcagttagaagaacaggtacttacaatttcatcagaaattcctaaaagaattcgaagtgccttaaaaaatgcagaagaatcaaagcaatttcttaatcagtttctggagcaggaaactcatctcttcagcgccattaacagccatttgctgactgcgcaaccttggatggacgatcttggaaccatgattagccagattgaagagatcgaacgtcatcttgcttaccttaaatggatttcacaaattgaagaactaagtgataacattcagcaatatctgatgaccaataatgtaccggaggcagcctccactctagtgtctatggcagaacttgacattaaacttcaggaatcatcttgtactcatcttcttggtttcatgagagccacagttaaattctggcataaaattctcaaggacaagcttacaagtgattttgaggaaattttagcacagcttcattggccattcatcgcaccccctcaatcacaaactgttggcttaagtcgacctgccagtgccccggagatatacagttacctggagacactgttttgtcagcttttgaaactacaaacctcagatgaattacttactgagccaaagcaactcccagaaaaatactctcttcctgcctccccttctgtcatcctgcccatccaggttatgctgactcctcttcagaagaggttcaggtatcacttcagagggaaccggcagactaatgtgttaagcaagccagaatggtacttggctcaagtacttatgtggattggaaaccatactgaatttctggatgagaagattcagccaatattagacaaagtaggctctttggtaaacgcaaggcttgaattttctcggggccttatgatgctggttcttgagaagttagccactgatattccttgtctgctatatgatgacaatctcttctgtcatttggtggatgaagtactcttgtttgaaagggagctacacagtgttcatggctatcctggcacttttgctagttgtatgcatattctatcagaggaaacctgttttcagagatggttgacggtggagagaaaatttgctcttcaaaaaatggactcaatgctttcctcagaagctgcctgggtatcgcaatataaggatatcactgacgtggatgaaatgaaagttccagattgtgcagaaacttttatgactctactcttggttataactgcttcccgaaagcttcagttcctggagttacagaaggacttagtagatgattttaggatacgattaacacaagtgatgaaagaagagactagagcttcccttggctttcgatactgtgcaattcttaatgctgtgaactacatctcaacagtactagcagattgggctgacaatgttttctttctacaacttcaacaggctgcactggaggtgtttgcagagaataatactctgagtaaattgcagctaggacagctagcctctatggagagctctgtctttgatgacatgattaacctcttagaacgtttaaagcatgatatgttgacccgtcaagtagaccacgtttttagagaagttaaagatgctgcaaaattgtataaaaaagaaagatggttgtccttgccatctcagtcagagcaggcagtgatgtccctgtccagttcggcttgcccgttgctgctgacgttacgagaccatttacttcagttggagcagcagctttgtttctccttatttaaaattttctggcaaatgcttgtagagaagctggatgtatacatctaccaagaaataattcttgctaatcacttcaatgaaggaggagcagcccagctgcagtttgatatgactcggaatcttt

SEQ ID NO: 2742 - DNA, 2025 bp, Artificial
  cDNA Sequence
gagacatcgagaggaagtcgctgtggcactcagtcctacggcctccgaggctgggtagtgagtgtgtcgctggccttagccagactccacaggccacgctggctgcgaatggagccgaggactcgcgcggaggcgagatgctaccagccggcgagatcggcgcctctcctgcagccccgtgctgctctgaaagtggtgacgaaaggaagaacctcgaggagaaaagtgacataaatgttacagttcttattggaagtaaacaagtcagtgaaggtacagataatggtgatctcccttcttatgtgtctgcattcatagaaaaggaagttggaaatgaccttaaatctttaaagaaacttgataaactcatagaacagaggacagtaagtaaaatgcagttagaagaacaggtacttacaatttcatcagaaattcctaaaagaattcgaagtgccttaaaaaatgcagaagaatcaaagcaatttcttaatcagtttctggagcaggaaactcatctcttcagcgccattaacagccatttgctgactgcgcaaccttggatggacgatcttggaaccatgattagccagattgaagagatcgaacgtcatcttgcttaccttaaatggatttcacaaattgaagaactaagtgataacattcagcaatatctgatgaccaataatgtaccggaggcagcctccactctagtgtctatggcagaacttgacattaaacttcaggaatcatcttgtactcatcttcttggtttcatgagagccacagttaaattctggcataaaattctcaaggacaagcttacaagtgattttgaggaaattttagcacagcttcattggccattcatcgcaccccctcaatcacaaactgttggcttaagtcgacctgccagtgccccggagatatacagttacctggagacactgttttgtcagcttttgaaactacaaacctcagatgaattacttactgagccaaagcaactcccagaaaaatactctcttcctgcctccccttctgtcatcctgcccatccaggttatgctgactcctcttcagaagaggttcaggtatcacttcagagggaaccggcagactaatgtgttaagcaagccagaatggtacttggctcaagtacttatgtggattggaaaccatactgaatttctggatgagaagattcagccaatattagacaaagtaggctctttggtaaacgcaaggcttgaattttctcggggccttatgatgctggttcttgagaagttagccactgatattccttgtctgctatatgatgacaatctcttctgtcatttggtggatgaagtactcttgtttgaaagggagctacacagtgttcatggctatcctggcacttttgctagttgtatgcatattctatcagaggaaacctgttttcagagatggttgacggtggagagaaaatttgctcttcaaaaaatggactcaatgctttcctcagaagctgcctgggtatcgcaatataaggatatcactgacgtggatgaaatgaaagttccagattgtgcagaaacttttatgactctactcttggttataactgacaggtataaaaatcttcccacagcttcccgaaagcttcagttcctggagttacagaaggacttagtagatgattttaggatacgattaacacaagtgatgaaagaagagactagagcttcccttggctttcgatactgtgcaattcttaatgctgtgaactacatctcaacagtactagcagattgggctgacaatgttttctttctacaacttcaacaggctgcactggaggtgtttgcagagaataatactctgagtaaattgcagctaggacagctagcctctatggagagctctgtctttgatgacatgattaacctcttagaacgtttaaagcatgatatgttgacccgtcaagtagaccacgtttttagagaagttaaagatgctgcaaaattgtataaaaaagaaaggt

SEQ ID NO: 2743 - DNA, 658 bp, Artificial
  cDNA Sequence
gagacatcgagaggaagtcgctgtggcactcagtcctacggcctccgaggctgggtagtgagtgtgtcgctggccttagccagactccacaggccacgctggctgcgaatggagccgaggactcgcgcggaggcgagatgctaccagccggcgagatcggcgcctctcctgcagccccgtgctgctctgaaagtggtgacgaaaggaagaacctcgaggagaaaagtgacataaatgttacagttcttattggaagtaaacaagtcagtgaaggtacagataatggtgatctcccttcttatgtgtctgcattcatagaaaaggaagttggaaatgaccttaaatctttaaagaaacttgataaactcatagaacagaggacagtaagtaaaatgcagttagaagaacaggtacttacaatttcatcagaaattcctaaaagaattcgaagtgccttaaaaaatgcagaagaatcaaagcaatttcttaatcagtttctggagcaggaaactcatctcttcagcgccattaacagccatttgctgactgcgcaaccttggatggacgatcttggaaccatgattagccagattgaagagatcgaacgtcatcttgcttaccttaaatggatttcacaaattgaagaactaaggtaaaa

SEQ ID NO: 2744 - DNA, 497 bp, Artificial
  cDNA Sequence
tgggaggattggttgagcccaggaagtccaggctgcagtgagctatgatggtaccactgcactccagcctgggcaacagcgtgagatcccctctcaaaaaaaaaattatgaaaattttatctgattgctgctgttctttctttctttcttttttaaaattatggtcaggtacttacaatttcatcagaaattcctaaaagaattcgaagtgccttaaaaaatgcagaagaatcaaagcaatttcttaatcagtttctggagcaggaaactcatctcttcagcgccattaacagccatttgctgactgcgcaaccttggatggacgatcttggaaccatgattagccagattgaagagatcgaacgtcatcttgcttaccttaaatggatttcacaaattgaagaactaagtgataacattcagcaatatctgatgaccaataatgtaccggaggcagcctccactctagtgtctatggcagaacttgacattaaact

SEQ ID NO: 2745 - DNA, 501 bp, Artificial
  cDNA Sequence
tggggaccgggaggaggcacacggccacagggacgtttgttcgtgattttgcaggaaagcacatggccctcgggagccagcgttcctctctgaagattctgcttttggcctgcactttggtggagcctgtggcatccatctttagggtagaatccagaggaatccttgtccttgaaaacgtcagaccaaagggatcaaatacaagagaaaaatgttgccaaactcacaatggccatgatggcattgagaatttacattctctcaagcctaaagaaggtgtcaaatggcagtggatttcagctttgctgggctgtgccctggtttaagctttgcacactggcccagggaagtcccacactaaagcccacagatgcgaataaattactgacagtgcccaacctcccctgccaggtggcatggaggtccagatgctgacctggctgaaagagaatactgtgttggcggctcctgatgcagagttaaatgcttgttaaagaaaaa

SEQ ID NO: 2746 - DNA, 901 bp, Artificial
  cDNA Sequence
gaacactcaatgtcggaacgttccgaagatgacgtcggagcgttctcgaatcccgtgtctctcggctgctgctgccgaaggaacagggaaaaagcaacaagaaggaagagcaatggcgacactggatcgcaaagtgcccagtccggaggcgtttctgggcaaaccctggtcctcctggatcgacgccgccaaattacactgctccgacaatgtagatttagaagaggctggaaaagagggtggaaaaagcagggaggttatgaggcttaataaagaagatatgcacttatttggccattacccagcacatgacgacttctatctcgtagtgtgcagtgcctgtaaccaggtcgtcaagccacaggttttccagtcgcactgcgggagaaagcaagacaacaggagaaatgaaggcatctccaggagtggaccagagagcagccaagccatagagaagcatcaggtgtgagaatggaaaacgcagaagagacgtacaacttctgaaagatctcagaggactggcattgtctggagacggcttcctggaagaggagactccagcagagccctgaagtgtggacaagcttccattcactgcaaattcgtgagcacactctggtgtcaggatctagtaaggaaatgggcttgagcagagcagggggtacctgtggggttcttctcttcattttcaccaccacaaagctggtctaagctgccatcaattcccacctggacaactgcaaaagccttccagctgttcctgcttccactcttgctcctctacaattcattctgcacgcagaagtcagaatcaaaatcaaagttcatcatgtcattctcttgacttgtggcttccctttgctcttaagctaaaagtaaaaatcattatcatggctacaaa

SEQ ID NO: 2747 - DNA, 1391 bp, Artificial
  cDNA Sequence
aaagtagcatgacgtctgtccttcagctgccaatatctacatttccttcaagagagaagacacggttcaatgtgtagaccttctccctctccagtgtctccagcctccaatcccaggacatcactagtacaggtgaaaacaaaagcctgtctcagcggccatcactctgccagcagcacctcaaagccattcaaaacgcccaaagacaatctacttacctccagcagcaaacagcacacagtctttcctgcgaaaggatcaagggataaaccatgtgttccagttcctgtagtcagtttagagaaaattcctaacctagtgaaggcagatggtgccaatgtcaaaatgaactccacaaccactactgcagtttctgcctcctccacctcgtcctctgccgtctccacccctcctttaattaagcctgtcctgatgtccaagtcagtgccaccttcaccagagaagatcttaaatggcaaaggaattctgccaaccaccatagacaagaaacaccaaaatggcaccaaaaacagcaacaagccttacaggagactttcagagagagaatttgacccaaataaacactgtggagtattggatcccgagacaaagaaaccttgcacaagatccctcacctgcaagacacattcgctaagccatcggagggcagtcccaggccggaaaaagcaatttgacctcctcctggcagaacacaaagcaaagtcccgggaaaaagaagttaaagataaagagcatctcctgacttccacgagggaaatacttccaagccaatccgggccggcacaggattctctgctagggtcttcagggagctctgggccagaaccaaaagttgcatcccctgcaaaatccagaccacccaactctgtacttcctagaccatcatctgcaaatagcataagcagcagcacatcttcaaatcatagcggccacactccagagcccccactcccaccggttggaggtgacctcgccagccgactgtccagtgatgaaggggagatggacggagccgacgaatccgagaagctagactgtcagttctccacgcaccaccccagacctctggcggaagatccctcctgcggcagatagccccctgccctcgccagcagcccacatcaccacccccgttccagcatccgttttgcagcctttcagcaaccccagtgctgtgtatcttccttcagctcccatcagctcgaggctcacctcttcttacataatgacatcagccatgctctcaaacgcagctttcgtgacatcgccggacccgagcgccctcatgtcccacaccacagctttccctcatgtggccgcaaccctcagcatcatggactcaaccttcaaggccccatccgccgtgtccc

SEQ ID NO: 2748 - DNA, 1443 bp, Artificial
  cDNA Sequence
aaagtagcatgacgtctgtccttcagctgccaatatctacatttccttcaagagagaagacacggttcaatgtgtagaccttctccctctccagtgtctccagcctccaatcccaggacatcactagtacaggtgaaaacaaaagcctgtctcagcggccatcactctgccagcagcacctcaaagccattcaaaacgcccaaagacaatctacttacctccagcagcaaacagcacacagtctttcctgcgaaaggatcaagggataaaccatgtgttccagttcctgtagtcagtttagagaaaattcctaacctagtgaaggcagatggtgccaatgtcaaaatgaactccacaaccactactgcagtttctgcctcctccacctcgtcctctgccgtctccacccctcctttaattaagcctgtcctgatgtccaagtcagtgccaccttcaccagagaagatcttaaatggcaaaggaattctgccaaccaccatagacaagaaacaccaaaatggcaccaaaaacagcaacaagccttacaggagactttcagagagagaatttgacccaaataaacactgtggagtattggatcccgagacaaagaaaccttgcacaagatccctcacctgcaagacacattcgctaagccatcggagggcagtcccaggccggaaaaagcaatttgacctcctcctggcagaacacaaagcaaagtcccgggaaaaagaagttaaagataaagagcatctcctgacttccacgagggaaatacttccaagccaatccgggccggcacaggattctctgctagggtcttcagggagctctgggccagaaccaaaagttgcatcccctgcaaaatccagaccacccaactctgtacttcctagaccatcatctgcaaatagcataagcagcagcacatcttcaaatcatagcggccacactccagagcccccactcccaccggttggaggtgacctcgccagccgactgtccagtgatgaaggggagatggacggagccgacgaatccgagaagctagactgtcagttctccacgcaccaccccagacctctggcgttttgctcatttgggagtcgcctcatgggacgagggtactatgtgtttgatagaagatgggatcgttttcgattcgcactaaactccatggtagaaaaacacctgaattcacagatgtggaagcacagaaacccgagccacagggcatcaggtccctcccccctgttcaggacttgcctaaccaatctgctgtcactgagcaacattggggctgcctgggtgtcaactctggagagcgtagcaccccgctaccctctcaacctcgctgcccaaaccccaggccccggcgggcccgaacctggagggatggcagccgatgggggcgtggaagacattaggaagaaaaggaac

SEQ ID NO: 2749 - DNA, 1322 bp, Artificial
  cDNA Sequence
aaagtagcatgacgtctgtccttcagctgccaatatctacatttccttcaagagagaagacacggttcaatgtgtagaccttctccctctccagtgtctccagcctccaatcccaggacatcactagtacaggtgaaaacaaaagcctgtctcagcggccatcactctgccagcagcacctcaaagccattcaaaacgcccaaagacaatctacttacctccagcagcaaacagcacacagtctttcctgcgaaaggatcaagggataaaccatgtgttccagttcctgtagtcagtttagagaaaattcctaacctagtgaaggcagatggtgccaatgtcaaaatgaactccacaaccactactgcagtttctgcctcctccacctcgtcctctgccgtctccacccctcctttaattaagcctgtcctgatgtccaagtcagtgccaccttcaccagagaagatcttaaatggcaaaggaattctgccaaccaccatagacaagaaacaccaaaatggcaccaaaaacagcaacaagccttacaggagactttcagagagagaatttgacccaaataaacactgtggagtattggatcccgagacaaagaaaccttgcacaagatccctcacctgcaagacacattcgctaagccatcggagggcagtcccaggccggaaaaagcaatttgacctcctcctggcagaacacaaagcaaagtcccgggaaaaagaagttaaagataaagagcatctcctgacttccacgagggaaatacttccaagccaatccgggccggcacaggattctctgctagggtcttcagggagctctgggccagaaccaaaagttgcatcccctgcaaaatccagaccacccaactctgtacttcctagaccatcatctgcaaatagcataagcagcagcacatcttcaaatcatagcggccacactccagagcccccactcccaccggttggaggtgacctcgccagccgactgtccagtgatgaaggggagatggacggagccgacgaatccgagaagctagactgtcagttctccacgcaccaccccagacctctggcgttttgctcatttgggagtcgcctcatgggacgagggtactatgtgtttgatagaagatgggatcgttttcgattcgcactaaactccatggtagaaaaacacctgaattcacagatgtggaagtaagtgagcagcttttgtgcaatataagatccaagctgccccacagttacctgaaacttaactttctaaataaatgtcagtggctgacttttcatagaacaaaatga

SEQ ID NO: 2750 - DNA, 270 bp, Artificial
  cDNA Sequence
tccagcccaggacacagccgacagaacacaaacagaacgggcaggataaggactcttccataacaagactatgaagccacttccacatcaattccaggccacctaatcccatccgaggaggccatggggaggaggagggaggggagtgggctggggggagagtctgttttctgtgcactccctgtgactctggcctttcttcttctttttttaattgaccaatttttagttaaaaaggcaaaagaaggtgaatttgagatttacagaaaa

SEQ ID NO: 2751 - DNA, 496 bp, Artificial
  cDNA Sequence
gccctaagcctggatcgcggacagtgacgttggtccacacctcacctgccctctctgccctgctacatgccccaggcttgccctgaaccgtgagctctagaaattccaggtccgggtcgcagccacagggcagtcaggcgtgtcacgtgaccgcgccgggtagagggagacagagtcgcacggctgagacgccaggcagtcgcctagcaacagcgggacgcggagcgatggagaccagcagcagggagctccaagccgcggagtatttggaaaagcatcagatcaaggaggtggttagctacctcaccagcgccctccttttctttcggccggccctaaaaaccctgggtctatgcactgaagatgaagatttacaagatgatggacataaaataactttggataaattcaaggaggaagtgaacaagaggatgaaggaaatatggtcagcattttaataacaccataaatccaagataataagtaattctataaa

SEQ ID NO: 2752 - DNA, 418 bp, Artificial
  cDNA Sequence
gggagctccaagccgcggagtatttggaaaagcatcagatcaaggaggtggttagctacctcaccagcgccctccttttctttcggccggaaaaaccaaaagaatatttaatatctctattggaacgactgagaattgcaaaagtaacaggcgtggcgtttcctttctttatggataactctaacattgtggctatgtttgagatgatggactcctcaggcagaggcaccatatcatttgtgcagtataaagaagccctaaaaaccctgggtctatgcactgaagatgaagatttacaagatgatggacataaaataactttggataaattcaaggaggaagtgaacaagaggatgaaggaaatatggtcagcattttaataacaccataaatccaagataataagtaattctataaa

SEQ ID NO: 2753 - DNA, 518 bp, Artificial
  cDNA Sequence
gataactctaacattgtggctatgtttgagatgatggactcctcaggcagaggcaccatatcatttgtgcagtataaagaagccctaaaaaccctgggtctatgcactgaagatgaagatttacaagatgatggacataaaataactttggataaattcaaggaggaagtgaacaagaggatgaaggaaatatgatgtatacatccagcttctctacaagcatttgccagaaaattttaaataaggagaaacaaagctgctgctccaactgaagtaaatggtctcgtaacgtcagcagcaacgggcaagccgaactggacagggacatcactgcctgctctgactgagatggcaaggacaaccatctggaaaaaacacatttttaccaaaaaattttcatcagtttctatttttcaagtttttaaatcattttaaatttgaggaagtgttctgtcctagggcattttggataagaaaaaatatacagcctaacattaaaagctctatcagaaaataaa

SEQ ID NO: 2754 - DNA, 558 bp, Artificial
  cDNA Sequence
tgtggctatgtttgagatgatggactcctcaggcagaggcaccatatcatttgtgcagtataaagaagccctaaaaaccctgggtctatgcactgaagatgaagatttacaagatgatggacataaaataactttggataaattcaaggaggaagtgaacaagaggatgaaggaaatatggtcagcattttaataacaccataaatccaagataataaatgtatacatccagcttctctacaagcatttgccagaaaattttaaataaggagaaacaaagctgctgctccaactgaagtaaatggtctcgtaacgtcagcagcaacgggcaagccgaactggacagggacatcactgcctgctctgactgagatggcaaggacaaccatctggaaaaaacacatttttaccaaaaaattttcatcagtttctatttttcaagtttttaaatcattttaaatttgaggaagtgttctgtcctagggcattttggataagaaaaaatatacagcctaacattaaaagctctatcagaaaataaatgtacctgtatttata

SEQ ID NO: 2755 - DNA, 442 bp, Artificial
  cDNA Sequence
gcaccatatcatttgtgcagtataaagaagccctaaaaaccctgggtctatgcactgaagatgaagatttacaagatgatggacataaaataactttggataaattcaaggaggaagtatgtatacatccagcttctctacaagcatttgccagaaaattttaaataaggagaaacaaagctgctgctccaactgaagtaaatggtctcgtaacgtcagcagcaacgggcaagccgaactggacagggacatcactgcctgctctgactgagatggcaaggacaaccatctggaaaaaacacatttttaccaaaaaattttcatcagtttctatttttcaagtttttaaatcattttaaatttgaggaagtgttctgtcctagggcattttggataagaaaaaatatacagcctaacattaaaagctctatcagaaaataaa

SEQ ID NO: 2756 - DNA, 441 bp, Artificial
  cDNA Sequence
cattattttacagccctaaaaaccctgggtctatgcactgaagatgaagatttacaagatgatggacataaaataactttggataaattcaaggaggaagtgaacaagaggatgaaggaaatatgatgtatacatccagcttctctacaagcatttgccagaaaattttaaataaggagaaacaaagctgctgctccaactgaagtaaatggtctcgtaacgtcagcagcaacgggcaagccgaactggacagggacatcactgcctgctctgactgagatggcaaggacaaccatctggaaaaaacacatttttaccaaaaaattttcatcagtttctatttttcaagtttttaaatcattttaaatttgaggaagtgttctgtcctagggcattttggataagaaaaaatatacagcctaacattaaaagctctatcag

SEQ ID NO: 2757 - DNA, 1270 bp, Artificial
  cDNA Sequence
gtgtgcgagcccggccgccggtgagtcggctggagcgcatctggtcctccgcgcggaaagcgctgcttttgcctggccgccctagccgctggctcatccaagtggccttcgccgctctcttgcgtcccaaccagagcgctggccacctcgccgcccagctcacgccgcgcccgcgctcccaggctccgggttttcttaaatgttttcttggagccttaaagatggagatgacagaaatgactggtgtgtcgctgaaacgtggggcactggttgtcgaagataatgacagtggagtcccagttgaagagacaaaaaaacagaagctgtcggaatgcagtctaaccaaaggtcaagatgggctacagaatgactttctgtccatcagtgaagacgtgcctcggcctcctgacactgtcagtactgggaaaggtggaaagaattctgaggctcagttggaagatgaggaagaagaggaggaagatggactttcagaggagtgcgaggaggaggaatcagagagttttgcagacatgatgaagcatggactcactgaggctgacgtaggcatcaccaagtttgtgagttctcatcaagggttctcgggaatcttaaaagaaagatactccgacttcgttgttcatgaaataggaaaagatggacggatcagccatttgaatgacttgtccattccagtggatgaggaggacccttcagaagacatatttacagttttgacagctgaagaaaagcagcgattggaagagctccagctgttcaaaaataaggaaaccagtgttgccattgaggttatcgaggacaccaaagagaaaagaaccatcatccatcaggctatcaaatctctgtttccaggattagagacaaaaacagaggatagggaggggaagaaatacattgtagcctaccacgcagctgggaaaaaggctttggcaaatccaagaaaacattcttggccaaaatctaggggaagttactgccacttcgtactatataaggaaaacaaagacaccatggatgctattaatgtactctccaaatacttaagagtcaagccaaatatattctcctacatgggaaccaaagataaaagggctataacagttcaagaaattgctgttctcaaaataactgcacaaagacttgcccacctgaataagtgcttgatgaactttaagctagggaatttcagctatcaaaaaaacccactgaaattgggagagcttcaaggaaaccacttcactgttgttctcag

SEQ ID NO: 2758 - DNA, 813 bp, Artificial
  cDNA Sequence
gtgtgcgagcccggccgccggtgagtcggctggagcgcatctggtcctccgcgcggaaagcgctgcttttgcctggccgccctagccgctggctcatccaagtggccttcgccgctctcttgcgtcccaaccagagcgctggccacctcgccgcccagctcacgccgcgcccgcgctcccaggctccgggttttcttaaatgttttcttggagccttaaagatggagatgacagaaatgactggtgtgtcgctgaaacgtggggcactggttgtcgaagataatgacagtggagtcccagttgaagagacaaaaaaacagaagctgtcggaatgcagtctaaccaaaggtcaagatgggctacagaatgactttctgtccatcagtgaagacgtgcctcggcctcctgacactgtcagtactgggaaaggtggaaagaattctgaggctcagttggaagatgaggaagaagaggaggaagatggactttcagaggagtgcgaggaggaggaatcagagagttttgcagacatgatgaagcatggactcactgaggctgacgtaggcatcaccaagtttgtgagttctcatcaagggttctcgggaatcttaaaagaaagatactccgacttcgttgttcatgaaataggaaaagatggacggatcagccatttgaatgacttgtccattccagtggatgaggaggacccttcagaagacatatttacagttttgacagctgaagaaaagcagcgattggaagagctccagctgttcaaaaataaggaaaccagtgttgccattgaggtaacta

SEQ ID NO: 2759 - DNA, 2032 bp, Artificial
  cDNA Sequence
aggacccttcagaagacatatttacagttttgacagctgaagaaaagcagcgattggaagagctccagctgttcaaaaataaggaaaccagtgttgccattgaggttatcgaggacaccaaagagaaaagaaccatcatccatcaggctatcaaatctctgtttccaggattagagacaaaaacagaggatagggaggggaagaaatacattgtagcctaccacgcagctgggaaaaaggctttggcaaatccaagaaaacattcttggccaaaatctaggggaagttactgccacttcgtactatataaggaaaacaaagacaccatggatgctattaatgtactctccaaatacttaagagtcaagccaaatatattctcctacatgggaaccaaagataaaagggctataacagttcaagaaattgctgttctcaaaataactgcacaaagacttgcccacctgaataagtgcttgatgaactttaagctagggaatttcagctatcaaaaaaacccactgaaattgggagagcttcaaggaaaccacttcactgttgttctcagaaatataacaggaactgatgaccaagtacagcaagctatgaactctctcaaggagattggatttattaactactatggaatgcaaagatttggaaccacagctgtccctacgtatcaggttggaagagctatactacaaaattcctggacagaagtcatggatttaatattgaaaccccgctctggagctgaaaagggctacttggttaaatgcagagaagaatgggcaaagaccaaagacccaactgctgccctcagaaaactacctgtcaaaaggtgtgtggaagggcagctgcttcgaggactttcaaaatatggaatgaagaatatagtctctgcatttggcataatacccagaaataatcgcttaatgtatattcatagctaccaaagctatgtgtggaataacatggtaagcaagaggatagaagactatggactaaaacctgttccaggggacctcgttctcaaaggagccacagccacctatattgaggaagatgatgttaataattactctatccatgatgtggtaatgcccttgcctggtttcgatgttatctacccaaagcataaaattcaagaagcctacagggaaatgctcacagctgacaatcttgatattgacaacatgagacacaaaattcgagattattccttgtcaggggcctaccgaaagatcattattcgtcctcagaatgttagctgggaagtcgttgcatatgatgatcccaaaattccacttttcaacacagatgtggacaacctagaagggaagacaccaccagtttttgcttctgaaggcaaatacagggctctgaaaatggatttttctctacccccttctacttacgccaccatggccattcgagaagtgctaaaaatggataccagtatcaagaaccagacgcagctgaatacaacctggcttcgctgagcagtaccttgtccacagattagaaaacgtacacaagtgtttgcttcctggctccctgtgcatttttgtcttagttcagactcatatatggatttcaaatctttgtaataaaaattatttgtatttttaagtttttattagcttaaagaaataatttgcaatatttgtacatgtacacaaatcctgaggttcttaattttagctcagaatataaattagtcaaaatacacttcaggtgcttaaatcagagtaaaatgtcagctttacaataataaaaaaaggactttggtttaaagtagcaggtttaggttttgctacattctcaaaagacagcaggagtatttgacacatctgtgatggagtatacaacaatgcattttaagagcaaatgcaacaaaacaaatctggactatggataaataatttgagagctgccacccacaaatataaatacagtactcatgctgactgaaataataagacatctacaaatttataaacaaaaagtgattgtcattatcctgctt

SEQ ID NO: 2760 - DNA, 793 bp, Artificial
  cDNA Sequence
agggaagtcgttgcatatgatgatcccaaaattccacttttcaacacagatgtggacaacctagaagggaagacaccaccagtttttgcttctgaaggcaaatacagggctctgaaaatggatttttctctacccccttctacttacgccaccatggccattcgagaagtgctaaaaatggataccagtatcaagaaccagacgcagctgaatacaacctggcttcgctgagcagtaccttgtccacagattagaaaacgtacacaagtgtttgcttcctggctccctgtgcatttttgtcttagttcagactcatatatggatttcaaatctttgtaataaaaattatttgtatttttaagtttttattagcttaaagaaataatttgcaatatttgtacatgtacacaaatcctgaggttcttaattttagctcagaatataaattagtcaaaatacacttcaggtgcttaaatcagagtaaaatgtcagctttacaataataaaaaaaggactttggtttaaagtagcaggtttaggttttgctacattctcaaaagacagcaggagtatttgacacatctgtgatggagtatacaacaatgcattttaagagcaaatgcaacaaaacaaatctggactatggataaataatttgagagctgccacccacaaatataaatacagtactcatgctgactgaaataataagacatctacaaatttataaacaaaaagtgattgtcattatcctgcttatgtactagattcaggcaagcattatagacttttt

SEQ ID NO: 2761 - DNA, 875 bp, Artificial
  cDNA Sequence
ctcggcgcccgcgtcgccgtcgcgaagccccccgccccgcttccgccgcgtcggaatgagctcccggaaagtgctggccattcaggcccgaaagcggaggccgaaaagagagaaacatccgaaaaagccggagcctcaacagaaagctcctttagttcctcctcctccaccgccaccaccaccaccaccgccacctttgccagaccccacacccccggagccagaggaggagatcctgggatcagatgatgaggagcaagaggaccctgcggactactgcaaaggtggatatcatccagtgaaaattggagacctcttcaatggccggtatcatgttattagaaagcttggatgggggcacttctctactgtctggctgtgctgggatatgcaggggaaaagatttgttgcaatgaaagttgtaaaaagtgcccagcattatacggagacagccttggatgaaataaaattgctcaaatgtgttcgagaaagtgatcccagtgacccaaacaaagacatggtggtccagctcattgacgacttcaagatttcaggcatgaatgggatacatgtctgcatggtcttcgaagtacttggccaccatctcctcaagtggatcatcaaatccaactatcaaggcctcccagtacgttgtgtgaagagtatcattcgacaggtccttcaagggttagattacttacacagtaagtgcaagatcattcatactgacataaagccggaaaatatcttgatgtgtgtggatgatgcatatgtgagaagaatggcagctgaggccactgagtggcagaaagcaggtgctcctcctccttcagggtctgcagtgagtacggctccacagcagaaacctgtaagta

SEQ ID NO: 2762 - DNA, 882 bp, Artificial
  cDNA Sequence
ctcggcgcccgcgtcgccgtcgcgaagccccccgccccgcttccgccgcgtcggaatgagctcccggaaagtgctggccattcaggcccgaaagcggaggccgaaaagagagaaacatccgaaaaagccggagcctcaacagaaagctcctttagttcctcctcctccaccgccaccaccaccaccaccgccacctttgccagaccccacacccccggagccagaggaggagatcctgggatcagatgatgaggagcaagaggaccctgcggactactgcaaaggtggatatcatccagtgaaaattggagacctcttcaatggccggtatcatgttattagaaagcttggatgggggcacttctctactgtctggctgtgctgggatatgcaggggaaaagatttgttgcaatgaaagttgtaaaaagtgcccagcattatacggagacagccttggatgaaataaaattgctcaaatgtgttcgagaaagtgatcccagtgacccaaacaaagacatggtggtccagctcattgacgacttcaagatttcaggcatgaatgggatacatgtctgcatggtcttcgaagtacttggccaccatctcctcaagtggatcatcaaatccaactatcaaggcctcccagtacgttgtgtgaagagtatcattcgacaggtgagacttttgacggcagcccctaggccctagtacctaattggttaggctttcaacatgaatgctgtttacaaatatgtatatgtattacatatgtatcagtgcataatgtatatatgttatgtatgttacatatgtatcagtgcataacattttgaactcttattaagtcagtatttaatgatattttgtgttgtgaagggaac

SEQ ID NO: 2763 - DNA, 2702 bp, Artificial
  cDNA Sequence
aatgtgtgtcttctcttccccagtgctggccattcaggcccgaaagcggaggccgaaaagagagaaacatccgaaaaagccggagcctcaacagaaagctcctttagttcctcctcctccaccgccaccaccaccaccaccgccacctttgccagaccccacacccccggagccagaggaggagatcctgggatcagatgatgaggagcaagaggaccctgcggactactgcaaaggtggatatcatccagtgaaaattggagacctcttcaatggccggtatcatgttattagaaagcttggatgggggcacttctctactgtctggctgtgctgggatatgcaggggaaaagatttgttgcaatgaaagttgtaaaaagtgcccagcattatacggagacagccttggatgaaataaaattgctcaaatgtgttcgagaaagtgatcccagtgacccaaacaaagacatggtggtccagctcattgacgacttcaagatttcaggcatgaatgggatacatgtctgcatggtcttcgaagtacttggccaccatctcctcaagtggatcatcaaatccaactatcaaggcctcccagtacgttgtgtgaagagtatcattcgacaggtccttcaagggttagattacttacacagtaagtgcaagatcattcatactgacataaagccggaaaatatcttgatgtgtgtggatgatgcatatgtgagaagaatggcagctgaggccactgagtggcagaaagcaggtgctcctcctccttcagggtctgcagtgagtacggctccacagcagaaacctataggaaaaatatctaaaaacaaaaagaaaaaactgaaaaagaaacagaagaggcaggctgagttattggagaagcgcctgcaggagatagaagaattggagcgagaagctgaaaggaaaataatagaagaaaacatcacctcagctgcaccttccaatgaccaggatggcgaatactgcccagaggtgaaactaaaaacaacaggattagaggaggcggctgaggcagagactgcaaaggacaatggtgaagctgaggaccaggaagagaaagaagatgctgagaaagaaaacattgaaaaagatgaagatgatgtagatcaggaacttgcgaacatagaccctacgtggatagaatcacctaaaaccaatggccatattgagaatggcccattctcactggagcagcaactggacgatgaagatgatgatgaagaagactgcccaaatcctgaggaatataatcttgatgagccaaatgcagaaagtgattacacatatagcagctcctatgaacaattcaatggtgaattgccaaatggacgacataaaattcccgagtcacagttcccagagttttccacctcgttgttctctggatccttagaacctgtggcctgcggctctgtgctttctgagggatcaccacttactgagcaagaggagagcagtccatcccatgacagaagcagaacggtttcagcctccagtactggggatttgccaaaagcaaaaacccgggcagctgacttgttggtgaatcccctggatccgcggaatgcagataaaattagagtaaaaattgctgacctgggaaatgcttgttgggtgcataaacacttcacggaagacatccagacgcgtcagtaccgctccatagaggttttaataggagcggggtacagcacccctgcggacatctggagcacggcgtgtatggcatttgagctggcaacgggagattatttgtttgaaccacattctggggaagactattccagagacgaagaccacatagcccacatcatagagctgctaggcagtattccaaggcactttgctctatctggaaaatattctcgggaattcttcaatcgcagaggagaactgcgacacatcaccaagctgaagccctggagcctctttgatgtacttgtggaaaagtatggctggccccatgaagatgctgcacagtttacagatttcctgatcccgatgttagaaatggttccagaaaaacgagcctcagctggcgaatgccttcggcatccttggttgaattcttagcaaattctaccaatattgcattctgagctagcaaatgttcccagtacattggacctaaacggtgactctcattctttaacaggattacaagtgagctggcttcatcctcagacctttattttgctttgaggtactgttgtttgacattttgctttttgtgcactgtgatcctggggaagggtagtcttttgtcttcagctaagtagtttactgaccattttcttctggaaacaataacatgtctctaagcattgtttcttgtgttgtgtgacattcaaatgtcatttttttgaatgaaaaatactttcccctttgtgttttggcaggttttgtaactatttatgaagaaatattttagctgagtactatataatttacaatcttaagaaattatcaagttggaaccaagaaatagcaaggaaatgtacaattttatcttctggcaaagggacatcattcctgtattatagtgtatgtaaatgcaccctgtaaatgttactttccattaaatatgggagggggactcaaatttcagaaaagctaccaagtcttgagtgctttgtagcctatgttgcatgtagcggactttaactgc

SEQ ID NO: 2764 - DNA, 2458 bp, Artificial
  cDNA Sequence
aatgtgtgtcttctcttccccagtgctggccattcaggcccgaaagcggaggccgaaaagagagaaacatccgaaaaagccggagcctcaacagaaagctcctttagttcctcctcctccaccgccaccaccaccaccaccgccacctttgccagaccccacacccccggagccagaggaggagatcctgggatcagatgatgaggagcaagaggaccctgcggactactgcaaaggtggatatcatccagtgaaaattggagacctcttcaatggccggtatcatgttattagaaagcttggatgggggcacttctctactgtctggctgtgctgggatatgcaggggaaaagatttgttgcaatgaaagttgtaaaaagtgcccagcattatacggagacagccttggatgaaataaaattgctcaaatgtgttcgagaaagtgatcccagtgacccaaacaaagacatggtggtccagctcattgacgacttcaagatttcaggcatgaatgggatacatgtctgcatggtcttcgaagtacttggccaccatctcctcaagtggatcatcaaatccaactatcaaggcctcccagtacgttgtgtgaagagtatcattcgacaggtccttcaagggttagattacttacacagtaagtgcaagatcattcatactgacataaagccggaaaatatcttgatgtgtgtggatgatgcatatgtgagaagaatggcagctgaggccactgagtggcagaaagcaggtgctcctcctccttcagggtctgcagtgagtacggctccacagcagaaacctataggaaaaatatctaaaaacaaaaagaaaaaactgaaaaagaaacagaagaggcaggctgagttattggagaagcgcctgcaggagatagaagaattggagcgagaagctgaaaggaaaataatagaagaaaacatcacctcagctgcaccttccaatgaccaggatggcgaatactgcccagaggtgaaactaaaaacaacaggattagaggaggcggctgaggcagagactgcaaaggacaatggtgaagctgaggaccaggaagagaaagaagatgctgagaaagaaaacattgaaaaagatgaagatgatgtagatcaggaacttgcgaacatagaccctacgtggatagaatcacctaaaaccaatggccatattgagaatggcccattctcactggagcagcaactggacgatgaagatgatgatgaagaagactgcccaaatcctgaggaatataatcttgatgagccaaatgcagaaagtgattacacatatagcagctcctatgaacaattcaatggtgaattgccaaatggacgacataaaattcccgagtcacagttcccagagttttccacctcgttgttctctggatccttagaacctgtggcctgcggctctgtgctttctgagggatcaccacttactgagcaagaggagagcagtccatcccatgacagaagcagaacggtttcagcctccagtactggggatttgccaaaagcaaaaacccgggcagctgacttgttggtgaatcccctggatccgcggaatgcagataaaattagagtaaaaattgctgacctgggaaatgcttgttgggtgcataaacacttcacggaagacatccagacgcgtcagtaccgctccatagaggttttaataggagcggggtacagcacccctgcggacatctggagcacggcgtgtatggcatttgagctggcaacgggagattatttgtttgaaccacattctggggaagactattccagagacgaagaccacatagcccacatcatagagctgctaggcagtattccaaggcactttgctctatctggaaaatattctcgggaattcttcaatcgcagagatcacatagcattgatcattgaactgctggggaaagtccctcgaaaatacgctatgttggggaaatactccaaggagtttttcaccagaaaaggagaactgcgacacatcaccaagctgaagccctggagcctctttgatgtacttgtggaaaagtatggctggccccatgaagatgctgcacagtttacagatttcctgatcccgatgttagaaatggttccagaaaaacgagcctcagctggcgaatgccttcggcatccttggttgaattcttagcaaattctaccaatattgcattctgagctagcaaatgttcccagtacattggacctaaacggtgactctcattctttaacaggattacaagtgagctggcttcatcctcagacctttattttgctttgaggtactgttgtttgacattttgctttttgtgcactgtgatcctggggaagggtagtcttttgtcttcagctaagtagtttactgaccattttcttctggaaacaataacatgtctctaagcattgtttc

SEQ ID NO: 2765 - DNA, 827 bp, Artificial
  cDNA Sequence
aatgtgtgtcttctcttccccagtgctggccattcaggcccgaaagcggaggccgaaaagagagaaacatccgaaaaagccggagcctcaacagaaagctcctttagttcctcctcctccaccgccaccaccaccaccaccgccacctttgccagaccccacacccccggagccagaggaggagatcctgggatcagatgatgaggagcaagaggaccctgcggactactgcaaaggtggatatcatccagtgaaaattggagacctcttcaatggccggtatcatgttattagaaagcttggatgggggcacttctctactgtctggctgtgctgggatatgcaggggaaaagatttgttgcaatgaaagttgtaaaaagtgcccagcattatacggagacagccttggatgaaataaaattgctcaaatgtgttcgagaaagtgatcccagtgacccaaacaaagacatggtggtccagctcattgacgacttcaagatttcaggcatgaatgggatacatgtctgcatggtcttcgaagtacttggccaccatctcctcaagtggatcatcaaatccaactatcaaggcctcccagtacgttgtgtgaagagtatcattcgacaggtccttcaagggttagattacttacacagtaagtgcaagatcattcatactgacataaagccggaaaatatcttgatgtgtgtggatgatgcatatgtgagaagaatggcagctgaggccactgagtggcagaaagcaggtgctcctcctccttcagggtctgcagtgagtacggctccacagcagaaacctgtaagta

SEQ ID NO: 2766 - DNA, 834 bp, Artificial
  cDNA Sequence
aatgtgtgtcttctcttccccagtgctggccattcaggcccgaaagcggaggccgaaaagagagaaacatccgaaaaagccggagcctcaacagaaagctcctttagttcctcctcctccaccgccaccaccaccaccaccgccacctttgccagaccccacacccccggagccagaggaggagatcctgggatcagatgatgaggagcaagaggaccctgcggactactgcaaaggtggatatcatccagtgaaaattggagacctcttcaatggccggtatcatgttattagaaagcttggatgggggcacttctctactgtctggctgtgctgggatatgcaggggaaaagatttgttgcaatgaaagttgtaaaaagtgcccagcattatacggagacagccttggatgaaataaaattgctcaaatgtgttcgagaaagtgatcccagtgacccaaacaaagacatggtggtccagctcattgacgacttcaagatttcaggcatgaatgggatacatgtctgcatggtcttcgaagtacttggccaccatctcctcaagtggatcatcaaatccaactatcaaggcctcccagtacgttgtgtgaagagtatcattcgacaggtgagacttttgacggcagcccctaggccctagtacctaattggttaggctttcaacatgaatgctgtttacaaatatgtatatgtattacatatgtatcagtgcataatgtatatatgttatgtatgttacatatgtatcagtgcataacattttgaactcttattaagtcagtatttaatgatattttgtgttgtgaagggaac

SEQ ID NO: 2767 - DNA, 2745 bp, Artificial
  cDNA Sequence
agtgctggccattcaggcccgaaagcggaggccgaaaagagagaaacatccgaaaaaaaatcaagcagaagattgagctgctgatgtcagttaactctgagaagtcgtcctcttcagaaaggccggagcctcaacagaaagctcctttagttcctcctcctccaccgccaccaccaccaccaccgccacctttgccagaccccacacccccggagccagaggaggagatcctgggatcagatgatgaggagcaagaggaccctgcggactactgcaaaggtggatatcatccagtgaaaattggagacctcttcaatggccggtatcatgttattagaaagcttggatgggggcacttctctactgtctggctgtgctgggatatgcaggggaaaagatttgttgcaatgaaagttgtaaaaagtgcccagcattatacggagacagccttggatgaaataaaattgctcaaatgtgttcgagaaagtgatcccagtgacccaaacaaagacatggtggtccagctcattgacgacttcaagatttcaggcatgaatgggatacatgtctgcatggtcttcgaagtacttggccaccatctcctcaagtggatcatcaaatccaactatcaaggcctcccagtacgttgtgtgaagagtatcattcgacaggtccttcaagggttagattacttacacagtaagtgcaagatcattcatactgacataaagccggaaaatatcttgatgtgtgtggatgatgcatatgtgagaagaatggcagctgaggccactgagtggcagaaagcaggtgctcctcctccttcagggtctgcagtgagtacggctccacagcagaaacctataggaaaaatatctaaaaacaaaaagaaaaaactgaaaaagaaacagaagaggcaggctgagttattggagaagcgcctgcaggagatagaagaattggagcgagaagctgaaaggaaaataatagaagaaaacatcacctcagctgcaccttccaatgaccaggatggcgaatactgcccagaggtgaaactaaaaacaacaggattagaggaggcggctgaggcagagactgcaaaggacaatggtgaagctgaggaccaggaagagaaagaagatgctgagaaagaaaacattgaaaaagatgaagatgatgtagatcaggaacttgcgaacatagaccctacgtggatagaatcacctaaaaccaatggccatattgagaatggcccattctcactggagcagcaactggacgatgaagatgatgatgaagaagactgcccaaatcctgaggaatataatcttgatgagccaaatgcagaaagtgattacacatatagcagctcctatgaacaattcaatggtgaattgccaaatggacgacataaaattcccgagtcacagttcccagagttttccacctcgttgttctctggatccttagaacctgtggcctgcggctctgtgctttctgagggatcaccacttactgagcaagaggagagcagtccatcccatgacagaagcagaacggtttcagcctccagtactggggatttgccaaaagcaaaaacccgggcagctgacttgttggtgaatcccctggatccgcggaatgcagataaaattagagtaaaaattgctgacctgggaaatgcttgttgggtgcataaacacttcacggaagacatccagacgcgtcagtaccgctccatagaggttttaataggagcggggtacagcacccctgcggacatctggagcacggcgtgtatggcatttgagctggcaacgggagattatttgtttgaaccacattctggggaagactattccagagacgaagaccacatagcccacatcatagagctgctaggcagtattccaaggcactttgctctatctggaaaatattctcgggaattcttcaatcgcagaggagaactgcgacacatcaccaagctgaagccctggagcctctttgatgtacttgtggaaaagtatggctggccccatgaagatgctgcacagtttacagatttcctgatcccgatgttagaaatggttccagaaaaacgagcctcagctggcgaatgccttcggcatccttggttgaattcttagcaaattctaccaatattgcattctgagctagcaaatgttcccagtacattggacctaaacggtgactctcattctttaacaggattacaagtgagctggcttcatcctcagacctttattttgctttgaggtactgttgtttgacattttgctttttgtgcactgtgatcctggggaagggtagtcttttgtcttcagctaagtagtttactgaccattttcttctggaaacaataacatgtctctaagcattgtttcttgtgttgtgtgacattcaaatgtcatttttttgaatgaaaaatactttcccctttgtgttttggcaggttttgtaactatttatgaagaaatattttagctgagtactatataatttacaatcttaagaaattatcaagttggaaccaagaaatagcaaggaaatgtacaattttatcttctggcaaagggacatcattcctgtattatagtgtatgtaaatgcaccctgtaaatgttactttccattaaatatgggagggggactcaaatttcagaaaagctaccaagtcttgagtgctttgtagcctatgttgcatgtagcggactttaactgc

SEQ ID NO: 2768 - DNA, 2501 bp, Artificial
  cDNA Sequence
agtgctggccattcaggcccgaaagcggaggccgaaaagagagaaacatccgaaaaaaaatcaagcagaagattgagctgctgatgtcagttaactctgagaagtcgtcctcttcagaaaggccggagcctcaacagaaagctcctttagttcctcctcctccaccgccaccaccaccaccaccgccacctttgccagaccccacacccccggagccagaggaggagatcctgggatcagatgatgaggagcaagaggaccctgcggactactgcaaaggtggatatcatccagtgaaaattggagacctcttcaatggccggtatcatgttattagaaagcttggatgggggcacttctctactgtctggctgtgctgggatatgcaggggaaaagatttgttgcaatgaaagttgtaaaaagtgcccagcattatacggagacagccttggatgaaataaaattgctcaaatgtgttcgagaaagtgatcccagtgacccaaacaaagacatggtggtccagctcattgacgacttcaagatttcaggcatgaatgggatacatgtctgcatggtcttcgaagtacttggccaccatctcctcaagtggatcatcaaatccaactatcaaggcctcccagtacgttgtgtgaagagtatcattcgacaggtccttcaagggttagattacttacacagtaagtgcaagatcattcatactgacataaagccggaaaatatcttgatgtgtgtggatgatgcatatgtgagaagaatggcagctgaggccactgagtggcagaaagcaggtgctcctcctccttcagggtctgcagtgagtacggctccacagcagaaacctataggaaaaatatctaaaaacaaaaagaaaaaactgaaaaagaaacagaagaggcaggctgagttattggagaagcgcctgcaggagatagaagaattggagcgagaagctgaaaggaaaataatagaagaaaacatcacctcagctgcaccttccaatgaccaggatggcgaatactgcccagaggtgaaactaaaaacaacaggattagaggaggcggctgaggcagagactgcaaaggacaatggtgaagctgaggaccaggaagagaaagaagatgctgagaaagaaaacattgaaaaagatgaagatgatgtagatcaggaacttgcgaacatagaccctacgtggatagaatcacctaaaaccaatggccatattgagaatggcccattctcactggagcagcaactggacgatgaagatgatgatgaagaagactgcccaaatcctgaggaatataatcttgatgagccaaatgcagaaagtgattacacatatagcagctcctatgaacaattcaatggtgaattgccaaatggacgacataaaattcccgagtcacagttcccagagttttccacctcgttgttctctggatccttagaacctgtggcctgcggctctgtgctttctgagggatcaccacttactgagcaagaggagagcagtccatcccatgacagaagcagaacggtttcagcctccagtactggggatttgccaaaagcaaaaacccgggcagctgacttgttggtgaatcccctggatccgcggaatgcagataaaattagagtaaaaattgctgacctgggaaatgcttgttgggtgcataaacacttcacggaagacatccagacgcgtcagtaccgctccatagaggttttaataggagcggggtacagcacccctgcggacatctggagcacggcgtgtatggcatttgagctggcaacgggagattatttgtttgaaccacattctggggaagactattccagagacgaagaccacatagcccacatcatagagctgctaggcagtattccaaggcactttgctctatctggaaaatattctcgggaattcttcaatcgcagagatcacatagcattgatcattgaactgctggggaaagtccctcgaaaatacgctatgttggggaaatactccaaggagtttttcaccagaaaaggagaactgcgacacatcaccaagctgaagccctggagcctctttgatgtacttgtggaaaagtatggctggccccatgaagatgctgcacagtttacagatttcctgatcccgatgttagaaatggttccagaaaaacgagcctcagctggcgaatgccttcggcatccttggttgaattcttagcaaattctaccaatattgcattctgagctagcaaatgttcccagtacattggacctaaacggtgactctcattctttaacaggattacaagtgagctggcttcatcctcagacctttattttgctttgaggtactgttgtttgacattttgctttttgtgcactgtgatcctggggaagggtagtcttttgtcttcagctaagtagtttactgaccattttcttctggaaacaataacatgtctctaagcattgtttc

SEQ ID NO: 2769 - DNA, 870 bp, Artificial
  cDNA Sequence
agtgctggccattcaggcccgaaagcggaggccgaaaagagagaaacatccgaaaaaaaatcaagcagaagattgagctgctgatgtcagttaactctgagaagtcgtcctcttcagaaaggccggagcctcaacagaaagctcctttagttcctcctcctccaccgccaccaccaccaccaccgccacctttgccagaccccacacccccggagccagaggaggagatcctgggatcagatgatgaggagcaagaggaccctgcggactactgcaaaggtggatatcatccagtgaaaattggagacctcttcaatggccggtatcatgttattagaaagcttggatgggggcacttctctactgtctggctgtgctgggatatgcaggggaaaagatttgttgcaatgaaagttgtaaaaagtgcccagcattatacggagacagccttggatgaaataaaattgctcaaatgtgttcgagaaagtgatcccagtgacccaaacaaagacatggtggtccagctcattgacgacttcaagatttcaggcatgaatgggatacatgtctgcatggtcttcgaagtacttggccaccatctcctcaagtggatcatcaaatccaactatcaaggcctcccagtacgttgtgtgaagagtatcattcgacaggtccttcaagggttagattacttacacagtaagtgcaagatcattcatactgacataaagccggaaaatatcttgatgtgtgtggatgatgcatatgtgagaagaatggcagctgaggccactgagtggcagaaagcaggtgctcctcctccttcagggtctgcagtgagtacggctccacagcagaaacctgtaagta

SEQ ID NO: 2770 - DNA, 877 bp, Artificial
  cDNA Sequence
agtgctggccattcaggcccgaaagcggaggccgaaaagagagaaacatccgaaaaaaaatcaagcagaagattgagctgctgatgtcagttaactctgagaagtcgtcctcttcagaaaggccggagcctcaacagaaagctcctttagttcctcctcctccaccgccaccaccaccaccaccgccacctttgccagaccccacacccccggagccagaggaggagatcctgggatcagatgatgaggagcaagaggaccctgcggactactgcaaaggtggatatcatccagtgaaaattggagacctcttcaatggccggtatcatgttattagaaagcttggatgggggcacttctctactgtctggctgtgctgggatatgcaggggaaaagatttgttgcaatgaaagttgtaaaaagtgcccagcattatacggagacagccttggatgaaataaaattgctcaaatgtgttcgagaaagtgatcccagtgacccaaacaaagacatggtggtccagctcattgacgacttcaagatttcaggcatgaatgggatacatgtctgcatggtcttcgaagtacttggccaccatctcctcaagtggatcatcaaatccaactatcaaggcctcccagtacgttgtgtgaagagtatcattcgacaggtgagacttttgacggcagcccctaggccctagtacctaattggttaggctttcaacatgaatgctgtttacaaatatgtatatgtattacatatgtatcagtgcataatgtatatatgttatgtatgttacatatgtatcagtgcataacattttgaactcttattaagtcagtatttaatgatattttgtgttgtgaagggaac

SEQ ID NO: 2771 - DNA, 2853 bp, Artificial
  cDNA Sequence
gctttttccctttatagcaccattgaatcccagtcctaacagaagtactgcgaatcttgtggcctcattctgaacaaaagggattagagaagaaaaatctcttgatataaggcttgaaagcaagggcaggcaatcttggttgtgaatattttctgatttttccagaaatcaagcagaagattgagctgctgatgtcagttaactctgagaagtcgtcctcttcagaaaggccggagcctcaacagaaagctcctttagttcctcctcctccaccgccaccaccaccaccaccgccacctttgccagaccccacacccccggagccagaggaggagatcctgggatcagatgatgaggagcaagaggaccctgcggactactgcaaaggtggatatcatccagtgaaaattggagacctcttcaatggccggtatcatgttattagaaagcttggatgggggcacttctctactgtctggctgtgctgggatatgcaggggaaaagatttgttgcaatgaaagttgtaaaaagtgcccagcattatacggagacagccttggatgaaataaaattgctcaaatgtgttcgagaaagtgatcccagtgacccaaacaaagacatggtggtccagctcattgacgacttcaagatttcaggcatgaatgggatacatgtctgcatggtcttcgaagtacttggccaccatctcctcaagtggatcatcaaatccaactatcaaggcctcccagtacgttgtgtgaagagtatcattcgacaggtccttcaagggttagattacttacacagtaagtgcaagatcattcatactgacataaagccggaaaatatcttgatgtgtgtggatgatgcatatgtgagaagaatggcagctgaggccactgagtggcagaaagcaggtgctcctcctccttcagggtctgcagtgagtacggctccacagcagaaacctataggaaaaatatctaaaaacaaaaagaaaaaactgaaaaagaaacagaagaggcaggctgagttattggagaagcgcctgcaggagatagaagaattggagcgagaagctgaaaggaaaataatagaagaaaacatcacctcagctgcaccttccaatgaccaggatggcgaatactgcccagaggtgaaactaaaaacaacaggattagaggaggcggctgaggcagagactgcaaaggacaatggtgaagctgaggaccaggaagagaaagaagatgctgagaaagaaaacattgaaaaagatgaagatgatgtagatcaggaacttgcgaacatagaccctacgtggatagaatcacctaaaaccaatggccatattgagaatggcccattctcactggagcagcaactggacgatgaagatgatgatgaagaagactgcccaaatcctgaggaatataatcttgatgagccaaatgcagaaagtgattacacatatagcagctcctatgaacaattcaatggtgaattgccaaatggacgacataaaattcccgagtcacagttcccagagttttccacctcgttgttctctggatccttagaacctgtggcctgcggctctgtgctttctgagggatcaccacttactgagcaagaggagagcagtccatcccatgacagaagcagaacggtttcagcctccagtactggggatttgccaaaagcaaaaacccgggcagctgacttgttggtgaatcccctggatccgcggaatgcagataaaattagagtaaaaattgctgacctgggaaatgcttgttgggtgcataaacacttcacggaagacatccagacgcgtcagtaccgctccatagaggttttaataggagcggggtacagcacccctgcggacatctggagcacggcgtgtatggcatttgagctggcaacgggagattatttgtttgaaccacattctggggaagactattccagagacgaagaccacatagcccacatcatagagctgctaggcagtattccaaggcactttgctctatctggaaaatattctcgggaattcttcaatcgcagaggagaactgcgacacatcaccaagctgaagccctggagcctctttgatgtacttgtggaaaagtatggctggccccatgaagatgctgcacagtttacagatttcctgatcccgatgttagaaatggttccagaaaaacgagcctcagctggcgaatgccttcggcatccttggttgaattcttagcaaattctaccaatattgcattctgagctagcaaatgttcccagtacattggacctaaacggtgactctcattctttaacaggattacaagtgagctggcttcatcctcagacctttattttgctttgaggtactgttgtttgacattttgctttttgtgcactgtgatcctggggaagggtagtcttttgtcttcagctaagtagtttactgaccattttcttctggaaacaataacatgtctctaagcattgtttcttgtgttgtgtgacattcaaatgtcatttttttgaatgaaaaatactttcccctttgtgttttggcaggttttgtaactatttatgaagaaatattttagctgagtactatataatttacaatcttaagaaattatcaagttggaaccaagaaatagcaaggaaatgtacaattttatcttctggcaaagggacatcattcctgtattatagtgtatgtaaatgcaccctgtaaatgttactttccattaaatatgggagggggactcaaatttcagaaaagctaccaagtcttgagtgctttgtagcctatgttgcatgtagcggactttaactgc

SEQ ID NO: 2772 - DNA, 2609 bp, Artificial
  cDNA Sequence
gctttttccctttatagcaccattgaatcccagtcctaacagaagtactgcgaatcttgtggcctcattctgaacaaaagggattagagaagaaaaatctcttgatataaggcttgaaagcaagggcaggcaatcttggttgtgaatattttctgatttttccagaaatcaagcagaagattgagctgctgatgtcagttaactctgagaagtcgtcctcttcagaaaggccggagcctcaacagaaagctcctttagttcctcctcctccaccgccaccaccaccaccaccgccacctttgccagaccccacacccccggagccagaggaggagatcctgggatcagatgatgaggagcaagaggaccctgcggactactgcaaaggtggatatcatccagtgaaaattggagacctcttcaatggccggtatcatgttattagaaagcttggatgggggcacttctctactgtctggctgtgctgggatatgcaggggaaaagatttgttgcaatgaaagttgtaaaaagtgcccagcattatacggagacagccttggatgaaataaaattgctcaaatgtgttcgagaaagtgatcccagtgacccaaacaaagacatggtggtccagctcattgacgacttcaagatttcaggcatgaatgggatacatgtctgcatggtcttcgaagtacttggccaccatctcctcaagtggatcatcaaatccaactatcaaggcctcccagtacgttgtgtgaagagtatcattcgacaggtccttcaagggttagattacttacacagtaagtgcaagatcattcatactgacataaagccggaaaatatcttgatgtgtgtggatgatgcatatgtgagaagaatggcagctgaggccactgagtggcagaaagcaggtgctcctcctccttcagggtctgcagtgagtacggctccacagcagaaacctataggaaaaatatctaaaaacaaaaagaaaaaactgaaaaagaaacagaagaggcaggctgagttattggagaagcgcctgcaggagatagaagaattggagcgagaagctgaaaggaaaataatagaagaaaacatcacctcagctgcaccttccaatgaccaggatggcgaatactgcccagaggtgaaactaaaaacaacaggattagaggaggcggctgaggcagagactgcaaaggacaatggtgaagctgaggaccaggaagagaaagaagatgctgagaaagaaaacattgaaaaagatgaagatgatgtagatcaggaacttgcgaacatagaccctacgtggatagaatcacctaaaaccaatggccatattgagaatggcccattctcactggagcagcaactggacgatgaagatgatgatgaagaagactgcccaaatcctgaggaatataatcttgatgagccaaatgcagaaagtgattacacatatagcagctcctatgaacaattcaatggtgaattgccaaatggacgacataaaattcccgagtcacagttcccagagttttccacctcgttgttctctggatccttagaacctgtggcctgcggctctgtgctttctgagggatcaccacttactgagcaagaggagagcagtccatcccatgacagaagcagaacggtttcagcctccagtactggggatttgccaaaagcaaaaacccgggcagctgacttgttggtgaatcccctggatccgcggaatgcagataaaattagagtaaaaattgctgacctgggaaatgcttgttgggtgcataaacacttcacggaagacatccagacgcgtcagtaccgctccatagaggttttaataggagcggggtacagcacccctgcggacatctggagcacggcgtgtatggcatttgagctggcaacgggagattatttgtttgaaccacattctggggaagactattccagagacgaagaccacatagcccacatcatagagctgctaggcagtattccaaggcactttgctctatctggaaaatattctcgggaattcttcaatcgcagagatcacatagcattgatcattgaactgctggggaaagtccctcgaaaatacgctatgttggggaaatactccaaggagtttttcaccagaaaaggagaactgcgacacatcaccaagctgaagccctggagcctctttgatgtacttgtggaaaagtatggctggccccatgaagatgctgcacagtttacagatttcctgatcccgatgttagaaatggttccagaaaaacgagcctcagctggcgaatgccttcggcatccttggttgaattcttagcaaattctaccaatattgcattctgagctagcaaatgttcccagtacattggacctaaacggtgactctcattctttaacaggattacaagtgagctggcttcatcctcagacctttattttgctttgaggtactgttgtttgacattttgctttttgtgcactgtgatcctggggaagggtagtcttttgtcttcagctaagtagtttactgaccattttcttctggaaacaataacatgtctctaagcattgtttc

SEQ ID NO: 2773 - DNA, 978 bp, Artificial
  cDNA Sequence
gctttttccctttatagcaccattgaatcccagtcctaacagaagtactgcgaatcttgtggcctcattctgaacaaaagggattagagaagaaaaatctcttgatataaggcttgaaagcaagggcaggcaatcttggttgtgaatattttctgatttttccagaaatcaagcagaagattgagctgctgatgtcagttaactctgagaagtcgtcctcttcagaaaggccggagcctcaacagaaagctcctttagttcctcctcctccaccgccaccaccaccaccaccgccacctttgccagaccccacacccccggagccagaggaggagatcctgggatcagatgatgaggagcaagaggaccctgcggactactgcaaaggtggatatcatccagtgaaaattggagacctcttcaatggccggtatcatgttattagaaagcttggatgggggcacttctctactgtctggctgtgctgggatatgcaggggaaaagatttgttgcaatgaaagttgtaaaaagtgcccagcattatacggagacagccttggatgaaataaaattgctcaaatgtgttcgagaaagtgatcccagtgacccaaacaaagacatggtggtccagctcattgacgacttcaagatttcaggcatgaatgggatacatgtctgcatggtcttcgaagtacttggccaccatctcctcaagtggatcatcaaatccaactatcaaggcctcccagtacgttgtgtgaagagtatcattcgacaggtccttcaagggttagattacttacacagtaagtgcaagatcattcatactgacataaagccggaaaatatcttgatgtgtgtggatgatgcatatgtgagaagaatggcagctgaggccactgagtggcagaaagcaggtgctcctcctccttcagggtctgcagtgagtacggctccacagcagaaacctgtaagta

SEQ ID NO: 2774 - DNA, 985 bp, Artificial
  cDNA Sequence
gctttttccctttatagcaccattgaatcccagtcctaacagaagtactgcgaatcttgtggcctcattctgaacaaaagggattagagaagaaaaatctcttgatataaggcttgaaagcaagggcaggcaatcttggttgtgaatattttctgatttttccagaaatcaagcagaagattgagctgctgatgtcagttaactctgagaagtcgtcctcttcagaaaggccggagcctcaacagaaagctcctttagttcctcctcctccaccgccaccaccaccaccaccgccacctttgccagaccccacacccccggagccagaggaggagatcctgggatcagatgatgaggagcaagaggaccctgcggactactgcaaaggtggatatcatccagtgaaaattggagacctcttcaatggccggtatcatgttattagaaagcttggatgggggcacttctctactgtctggctgtgctgggatatgcaggggaaaagatttgttgcaatgaaagttgtaaaaagtgcccagcattatacggagacagccttggatgaaataaaattgctcaaatgtgttcgagaaagtgatcccagtgacccaaacaaagacatggtggtccagctcattgacgacttcaagatttcaggcatgaatgggatacatgtctgcatggtcttcgaagtacttggccaccatctcctcaagtggatcatcaaatccaactatcaaggcctcccagtacgttgtgtgaagagtatcattcgacaggtgagacttttgacggcagcccctaggccctagtacctaattggttaggctttcaacatgaatgctgtttacaaatatgtatatgtattacatatgtatcagtgcataatgtatatatgttatgtatgttacatatgtatcagtgcataacattttgaactcttattaagtcagtatttaatgatattttgtgttgtgaagggaac

SEQ ID NO: 2775 - DNA, 436 bp, Artificial
  cDNA Sequence
gcaagaggaccctgcggactactgcaaaggattacaagtgagctggcttcatcctcagacctttattttgctttgaggtactgttgtttgacattttgctttttgtgcactgtgatcctggggaagggtagtcttttgtcttcagctaagtagtttactgaccattttcttctggaaacaataacatgtctctaagcattgtttcttgtgttgtgtgacattcaaatgtcatttttttgaatgaaaaatactttcccctttgtgttttggcaggttttgtaactatttatgaagaaatattttagctgagtactatataatttacaatcttaagaaattatcaagttggaaccaagaaatagcaaggaaatgtacaattttatcttctggcaaagggacatcattcctgtattatagtgtatgtaaatgcaccctg

SEQ ID NO: 2776 - DNA, 725 bp, Artificial
  cDNA Sequence
ctgagtactatataatttacaatcttaagaaattatcaagttggaaccaagaaatagcaaggaaatgtacaattttatcttctggcaaagggacatcattcctgtattatagttccatgtgaaatcttcatggaaaatgacaagcagtggatcacatatgtgtttatagcagatacaggagctggctatctagaagttggcagacagaactgcccaaaggcagagaaaagataattggatggttaagaatttcatgacaaggctatgaatttcctggacaccactagaatagaggtggaacatttgaagaaaatgtaagctgttgaagtgtgcttagaaaacttgaatgtttggtcagagttatccatcacatgttcagtaagaagaacaaacagtagtaaacacaattgagtatttctgacaggaaaagtgtccagaagtcacaagttgatacttgatacagcagaaaaacactgcatattataaccatcagcttttctgcactcaacctaaagtcctttggaacccatcgaaaggtcaatgttattaccttgctcatttttggaggacttttacaagtattttgagaagtatctggggatggacattcattcgtagttgtgggttctggattttcaggatcagggtctataaagcagaagaaacctatagtaagtataaaattacacaataaacactgttttaacaccacaaagcaacataca

SEQ ID NO: 2777 - DNA, 2750 bp, Artificial
  cDNA Sequence
ctcggcgcccgcgtcgccgtcgcgaagccccccgccccgcttccgccgcgtcggaatgagctcccggaaagtgctggccattcaggcccgaaagcggaggccgaaaagagagaaacatccgaaaaagccggagcctcaacagaaagctcctttagttcctcctcctccaccgccaccaccaccaccaccgccacctttgccagaccccacacccccggagccagaggaggagatcctgggatcagatgatgaggagcaagaggaccctgcggactactgcaaaggtggatatcatccagtgaaaattggagacctcttcaatggccggtatcatgttattagaaagcttggatgggggcacttctctactgtctggctgtgctgggatatgcaggggaaaagatttgttgcaatgaaagttgtaaaaagtgcccagcattatacggagacagccttggatgaaataaaattgctcaaatgtgttcgagaaagtgatcccagtgacccaaacaaagacatggtggtccagctcattgacgacttcaagatttcaggcatgaatgggatacatgtctgcatggtcttcgaagtacttggccaccatctcctcaagtggatcatcaaatccaactatcaaggcctcccagtacgttgtgtgaagagtatcattcgacaggtccttcaagggttagattacttacacagtaagtgcaagatcattcatactgacataaagccggaaaatatcttgatgtgtgtggatgatgcatatgtgagaagaatggcagctgaggccactgagtggcagaaagcaggtgctcctcctccttcagggtctgcagtgagtacggctccacagcagaaacctataggaaaaatatctaaaaacaaaaagaaaaaactgaaaaagaaacagaagaggcaggctgagttattggagaagcgcctgcaggagatagaagaattggagcgagaagctgaaaggaaaataatagaagaaaacatcacctcagctgcaccttccaatgaccaggatggcgaatactgcccagaggtgaaactaaaaacaacaggattagaggaggcggctgaggcagagactgcaaaggacaatggtgaagctgaggaccaggaagagaaagaagatgctgagaaagaaaacattgaaaaagatgaagatgatgtagatcaggaacttgcgaacatagaccctacgtggatagaatcacctaaaaccaatggccatattgagaatggcccattctcactggagcagcaactggacgatgaagatgatgatgaagaagactgcccaaatcctgaggaatataatcttgatgagccaaatgcagaaagtgattacacatatagcagctcctatgaacaattcaatggtgaattgccaaatggacgacataaaattcccgagtcacagttcccagagttttccacctcgttgttctctggatccttagaacctgtggcctgcggctctgtgctttctgagggatcaccacttactgagcaagaggagagcagtccatcccatgacagaagcagaacggtttcagcctccagtactggggatttgccaaaagcaaaaacccgggcagctgacttgttggtgaatcccctggatccgcggaatgcagataaaattagagtaaaaattgctgacctgggaaatgcttgttgggtgcataaacacttcacggaagacatccagacgcgtcagtaccgctccatagaggttttaataggagcggggtacagcacccctgcggacatctggagcacggcgtgtatggcatttgagctggcaacgggagattatttgtttgaaccacattctggggaagactattccagagacgaagaccacatagcccacatcatagagctgctaggcagtattccaaggcactttgctctatctggaaaatattctcgggaattcttcaatcgcagaggagaactgcgacacatcaccaagctgaagccctggagcctctttgatgtacttgtggaaaagtatggctggccccatgaagatgctgcacagtttacagatttcctgatcccgatgttagaaatggttccagaaaaacgagcctcagctggcgaatgccttcggcatccttggttgaattcttagcaaattctaccaatattgcattctgagctagcaaatgttcccagtacattggacctaaacggtgactctcattctttaacaggattacaagtgagctggcttcatcctcagacctttattttgctttgaggtactgttgtttgacattttgctttttgtgcactgtgatcctggggaagggtagtcttttgtcttcagctaagtagtttactgaccattttcttctggaaacaataacatgtctctaagcattgtttcttgtgttgtgtgacattcaaatgtcatttttttgaatgaaaaatactttcccctttgtgttttggcaggttttgtaactatttatgaagaaatattttagctgagtactatataatttacaatcttaagaaattatcaagttggaaccaagaaatagcaaggaaatgtacaattttatcttctggcaaagggacatcattcctgtattatagtgtatgtaaatgcaccctgtaaatgttactttccattaaatatgggagggggactcaaatttcagaaaagctaccaagtcttgagtgctttgtagcctatgttgcatgtagcggactttaactgc

SEQ ID NO: 2778 - DNA, 2506 bp, Artificial
  cDNA Sequence
ctcggcgcccgcgtcgccgtcgcgaagccccccgccccgcttccgccgcgtcggaatgagctcccggaaagtgctggccattcaggcccgaaagcggaggccgaaaagagagaaacatccgaaaaagccggagcctcaacagaaagctcctttagttcctcctcctccaccgccaccaccaccaccaccgccacctttgccagaccccacacccccggagccagaggaggagatcctgggatcagatgatgaggagcaagaggaccctgcggactactgcaaaggtggatatcatccagtgaaaattggagacctcttcaatggccggtatcatgttattagaaagcttggatgggggcacttctctactgtctggctgtgctgggatatgcaggggaaaagatttgttgcaatgaaagttgtaaaaagtgcccagcattatacggagacagccttggatgaaataaaattgctcaaatgtgttcgagaaagtgatcccagtgacccaaacaaagacatggtggtccagctcattgacgacttcaagatttcaggcatgaatgggatacatgtctgcatggtcttcgaagtacttggccaccatctcctcaagtggatcatcaaatccaactatcaaggcctcccagtacgttgtgtgaagagtatcattcgacaggtccttcaagggttagattacttacacagtaagtgcaagatcattcatactgacataaagccggaaaatatcttgatgtgtgtggatgatgcatatgtgagaagaatggcagctgaggccactgagtggcagaaagcaggtgctcctcctccttcagggtctgcagtgagtacggctccacagcagaaacctataggaaaaatatctaaaaacaaaaagaaaaaactgaaaaagaaacagaagaggcaggctgagttattggagaagcgcctgcaggagatagaagaattggagcgagaagctgaaaggaaaataatagaagaaaacatcacctcagctgcaccttccaatgaccaggatggcgaatactgcccagaggtgaaactaaaaacaacaggattagaggaggcggctgaggcagagactgcaaaggacaatggtgaagctgaggaccaggaagagaaagaagatgctgagaaagaaaacattgaaaaagatgaagatgatgtagatcaggaacttgcgaacatagaccctacgtggatagaatcacctaaaaccaatggccatattgagaatggcccattctcactggagcagcaactggacgatgaagatgatgatgaagaagactgcccaaatcctgaggaatataatcttgatgagccaaatgcagaaagtgattacacatatagcagctcctatgaacaattcaatggtgaattgccaaatggacgacataaaattcccgagtcacagttcccagagttttccacctcgttgttctctggatccttagaacctgtggcctgcggctctgtgctttctgagggatcaccacttactgagcaagaggagagcagtccatcccatgacagaagcagaacggtttcagcctccagtactggggatttgccaaaagcaaaaacccgggcagctgacttgttggtgaatcccctggatccgcggaatgcagataaaattagagtaaaaattgctgacctgggaaatgcttgttgggtgcataaacacttcacggaagacatccagacgcgtcagtaccgctccatagaggttttaataggagcggggtacagcacccctgcggacatctggagcacggcgtgtatggcatttgagctggcaacgggagattatttgtttgaaccacattctggggaagactattccagagacgaagaccacatagcccacatcatagagctgctaggcagtattccaaggcactttgctctatctggaaaatattctcgggaattcttcaatcgcagagatcacatagcattgatcattgaactgctggggaaagtccctcgaaaatacgctatgttggggaaatactccaaggagtttttcaccagaaaaggagaactgcgacacatcaccaagctgaagccctggagcctctttgatgtacttgtggaaaagtatggctggccccatgaagatgctgcacagtttacagatttcctgatcccgatgttagaaatggttccagaaaaacgagcctcagctggcgaatgccttcggcatccttggttgaattcttagcaaattctaccaatattgcattctgagctagcaaatgttcccagtacattggacctaaacggtgactctcattctttaacaggattacaagtgagctggcttcatcctcagacctttattttgctttgaggtactgttgtttgacattttgctttttgtgcactgtgatcctggggaagggtagtcttttgtcttcagctaagtagtttactgaccattttcttctggaaacaataacatgtctctaagcattgtttc

SEQ ID NO: 2779 - DNA, 2413 bp, Artificial
  cDNA Sequence
ctttttcttgggactttgaatgttcgcagtgtggacaccaatatcaaaacaggcatatgaagagtctggtcacctttacaaatgtcatccctgagtggcacccacttaatgctgcccattttggtccatgtaacaattgcaacagtaaatcacaaataagaaaaatggtattagaaaaagtatctcccatattcatgttgcactttgtagaaggcttaccacagaatgacttgcagcactatgcatttcattttgaaggctgtctttatcagataacttctgtaattcagtatcgagcaaataatcattttataacatggattttagatgctgatggtaattggctggaatgtgatgacttaaaaggcccatgttctgaaaggcacaagaaatttgaagttcctgcttcagagatacatattgttatttgggaaagaaaaatatcccaagtgacagataaagaagctgcctgccttccacttaaaaagactaatgaccaacacgctctcagtaatgagaaaccagtatctttaacatcgtgttctgtgggtgatgctgcctcagctgaaacagcctcagtaactcaccctaaagatatatcagttgcccctcgtactctttcacaggacacagctgtaactcatggagatcatttactttcaggtccaaaaggtttggttgacaatattttacctctgacacttgaagaaactatccagaaaacagcctcagtttcacagttaaattctgaagctttcctgttagaaaataaacctgtagcagaaaatacaggaattctcaaaaccaatactttgctatcacaagaatcactaatggcttcttcagtatcagctccatgtaatgaaaagcttattcaagaccaatttgtggacataagttttccatcccaagttgtaaatacaaacatgcagtcagtacagctgaatacagaagatactgtaaatactaaatctgtgaataatactgatgctactggtcttatacagggagtgaagtcagtagaaattgagaaggacgctcagttaaaacaattccttacaccaaaaactgaacaattaaaaccagaacgtgtcacatctcaggtatctaatttgaagaaaaaagaaactacagcagattctcaaaccacaacatctaagtcattacagaatcagtctctgaaagaaaatcagaagaagccatttgtgggaagttgggttaaaggcttaataagcaggggtgcttcttttatgccactctgtgtttcagctcataatagaaacactataactgatttacaaccttcagttaaaggggtaaataattttggtggctttaaaactaaaggtataaaccagaaggccagccacgtatccaagaaagctcgtaagagtgcaagtaagcctcctcccatcagtaagccaccagcaggccctccatcgtctaatggcacagctgcccacccacatgctcatgctgcttcagaagttttggaaaagtctggaagcacctcatgtggagctcaactcaaccacagttcttatgggaatggtatttcttcagcaaaccatgaagacttggtggaaggtcagattcataaacttcgtctaaaacttcgtaaaaagctaaaggcagaaaagaagaaattagctgctcttatgtcttccccgcaaagcagaacagttcgaagtgaaaatctagaacaggtgccccaggatgggtctccaaatgattgtgaatcaatagaggacttgttaaatgagctaccatatccaattgatattgccagtgagtctgcatgcaccactgttcctggtgtttccctgtacagtagtcaaactcatgaagaaattttagcggaattattgtctcctacacctgtttcaacagagctgtcagaaaatggggaaggtgactttaggtatttgggaatgggagatagtcatatcccaccaccagtaccaagtgaattcaatgatgtttcccagaacacacatctgagacaggaccataattattgtagccccaccaagaaaaatccatgtgaagttcagccagactctctgacaaataatgcctgcgttagaacattaaacttggagagtccgatgaagactgatattttcgatgagtttttttcctcctcagcattaaatgctttagcaaatgacacattagacctacctcatttcgatgaatatctgtttgagaattattgaattaatgcttgttaacttttttcatataatatttattattattagaagaacttacaatgtgttcaggtagtgtttatacactggacttgtgtaattacttgtgtaataaccatgaacaaaatgcaaggtttaacctttggttctgcccatgaagcatgtaatctttcttacacattaaaatcactgaatgtgtt

SEQ ID NO: 2780 - DNA, 1148 bp, Artificial
  cDNA Sequence
cggaaaggcgcctgggctggtgacggtgtcaagtgtaggcaagaaatacggctgatcaagaagcgacttcacctccctcgcacaacactgagtccctttgcggcaggggccctccccgccgcgaaccctacttggaaccttgcgccatgcgatgtctctctcattctaggccacggaagccctgggtcaccctttcagcctggttctctccggtggtgctggcttgtttctcctgtctgttggggtcagctgcgtccagcctcggctcctgcaggattgcccgggcaacccagaggagatgggcgggcgtggaggtcctccctggatgacccttcccaccatttcaacatcattaggaatttaacaggcttttgcaagaaggcccagtctccctgcttcctggcctttctatttaaaagcacccatcttcaccttctcccaaaggctctggaagttttacagacagcatctttctagcctcgccctgcgtctctttctagtcatttgactgaggctgaacaaagcccagatgggagtttcattcccttcacctcccccaactcccagctgaaggaggctggccccagacacaggacacagcttcctgaccctgcgggcaggagcctggcttgttggtgacgggcaggagcctggcttgttggtgagtgggcctcctcattgctgctggagttttccatcctcattccacaacaagccaagtcagcaagttgctgccaggaaccttcacaccttgtgctttgggatctgaggggaaacacacacaccggcaccaccctccctgagcccgggaatgaagccagcatcagcggagagcaacctactgaggaaaatgatggagtaattccctgggcacacttcaggcgtggtgccaggtaacaggccctgccagggggtgacagaggtggtaccatggcatgtctggggcctgccccgagacaccagctggcagcagccacactctgtccttagcagcactcgcagcagtccaacactttggttgtcacgcaagacacgctgtttctgacaggacgccgcagccgggtaacacgggcagatgcagagggcactatcctgcggcgcttttttgaaagcacgccatttttcttccctacccaattaactttcca

SEQ ID NO: 2781 - DNA, 635 bp, Artificial
  cDNA Sequence
ccatccctaggtcctggatggggcaggaggacagagtcacacagaggagaccatcttgagaagagcagtgacctctcaggtgactcaggagtgactcaggacaaagtctgaagcagccgctccaggagtgaccctgaggagaaggagtctaccctcactccatttccttccctcattggccacacccaaccagagaccagaggggaagggagtccctgatgtggtccagacagaggagtttgaaattcttgcttcaggccatatggagtggatattccttccagaaggaaattacagaccactctctgtttctactcaactgcttttcactccaggatgcttcacctcttggggccttccccagcagaggcccaggatcacctgcaaaaggcttccccaagggtggggccagaagcagggctgcagatatgtgtcctgaacctcccatggaccctgctggctcccttcaaaggcttcgggcatagcgacttgcctttccgtcttgttcagtcgtcaccagtcagccgtctgcagacttctctccctcacgttgtggcagaggagttgtacattctctagattttaaaaatatataagttactttttctttaaaataaaaattgtctctgaaataa

SEQ ID NO: 2782 - DNA, 403 bp, Artificial
  cDNA Sequence
gaggagtttgaaattcttgcttcaggccatatggagtggatattccttccagaaggaaattacagaccactctctgtttctactcaactgcttttcactccaggatgcttcacctcttggggccttccccagcagaggcccaggatcacctgcaaaaggcttccccaagggtggggccagaagcagggctgcagatatgtgtcctgaacctcccatggaccctgctggctcccttcaaaggcttcgggcatagcgacttgcctttccgtcttgttcagtcgtcaccagtcagccgtctgcagacttctctccctcacgttgtggcagaggagttgtacattctctagattttaaaaatatataagttactttttctttaaaataaaaattgtctctgaaataa

SEQ ID NO: 2783 - DNA, 2034 bp, Artificial
  cDNA Sequence
ataggtatgtggaactgaccaactactgtgattataaagactacagggaaactatattgagcaaaccaatgttgttctttattaatgtacagaccaaaaaagacacctcaaaagaaaggacgtacgcgtttcttgtaaacacgaggcaccccaagataagaagacagatagagcaagggatggacatggtcatctcctcagtgattggagaaagttaccggcttcagtttgattttcaagaggcagtgaagaatttcttccccccaggaaatgaagtggttaatggagaaaatttaagctttgcatatgaattcaaagctgatgcattatttgatttcttctattggtttgggctcagtaattccgttgtaaaagtaaatggaaaagttctgaatttgtcaagtacaagtccagaaaagaaggagacgattaagttatttctggaaaaaatgagtgagcctttaatccgaaggagcagtttctctgaccgaaagttcagtgtaacttccagaggttcaatagatgatgtttttaactgcaatctgtcacccagatcatctctgacagagcctcttttggcagaattaccatttccaagtgttctggaatctgaagagacacccaaccaatttatctgattgaactgaacattgtagcagttgctcccgcactccaggcctgtgctagactataggctggggggagggtaggaggtgggaggcagatacttccacctgcgtgtcaatctccggctcctccatggcttctatggaggactcctctcttctgcttctgtggatgtgatgccctggcaggcccagggcagctgattcccctaaaacttatgattaccaggatggaaaggccttggtcccatggcactgggtggggctgggggatattctctactttgaacacttctccaaagaggcagaagggccacagagttctgccaccctgaacatttttctcagttccctgggagtttttgtggcagcctttgtgggagtggtctgactggctgttgacctagcatgcttcataaatcagggtttggccctctgcttggagcatccaaccccttgaactcaaacctgtcgagcaaggggttaagagttctgttctcttgccaacctggctgggcaaaagcctgtgccatctttcactgggaggcaaatatgtttttcatcctgccatatgacacctatgagaaacgttcacagtgaggagtagccaggttgctaggacagtaaccctgccacacactgcctgaaatcggaactcccttggcctccctcttaactaagtgacccatgtagaaggaagccaggagatatggtaccgaacaatgacaggggaagggtattggacacggcagcgtcctccttattgaaaacacattatgtcagttgggaattttaaataagcttttagcaaacctaacactaaaagcaaaatagaagaaagctataccattaccataatacatttttcatctcatggctacaatggaattcttgaaaaggaaaaaaaaatcctatctacatataaaaacctgcatgaatgaatcactacatatgcttataatgaggaagagttatgggtcctgagtgtaattttttatcctttcttaaaaagtttctgtattatgcattttgataacactactgatgatccttccacttatatttgaaatgttatgtaccacatttgcacaattaaaacttttcttagcattcaacctagaattgattaaatttatgactgaggcttcatgtgagctttccattgtggtttgtgggtgttgtatttgccttgtaacttactgaattacaataagaattgtgggttttcatagccactttctcaagaagcgccttttgaagaacaaggctatgaagtatttgaagaaaggaaataaaatttgatactgatctttcagaaaagagaaggggaatgctacttaataacagaagatgttaaacatttattattacactcaataaaaaatgaagagtattaacaataaactaa

SEQ ID NO: 2784 - DNA, 789 bp, Artificial
  cDNA Sequence
ggacattttcctgtggacactacctcactgtcaacaaacggggacactaaagaactgcctcccttggaaaatcccggcttcaatgaaagaagttaacaaggcactatcaaatcagtttatttcccttactaagagagactttgtggacagatcaaaagctcagaagattaagaaaagttctcacttgtctctggaatggaaaaagttacttccccaacctccagacactgaattccgaaggaattaccaaattccagctaaaattcctgagcttcaagatttcagtttcaaatatggatgctactcaagcttgcctgttgcttctcagggtctagtgccttctgtgctgcacagctacctgaggaaccaagagcacacaaagaaacagaccacataccaaagtgactacgacaaaacctacccagatttcttaatgcttttaaactcatttacttcctctcaagtcaaagagtaccttcagagtctttcctacaaagatagacaaattattgatcgctttattcgtactcactgtgacactaacaaaaagaagaaatgaaaagggaaaatagtacaaatgaagaaaatctgaaaatcaatggaagcacgaggacattcctagtcattttctcaattatcaaggaaaaataagatgcaaatagcttcaagtatgatgtgatagtcatgaatttgtgtcttttgctccgctttatttttaaacaataaaattaaggctacaaaattttccctgaacatagctttagctgtatccaatagtttttgatacaa

SEQ ID NO: 2785 - DNA, 648 bp, Artificial
  cDNA Sequence
agagaagggtcagccgcggcggcagggcggcggcggcagcggcgcagctccgctccccgcgcgtctcccttccccgcgcccaggtagggcgctcagcctccgccgccaggatgcggccgcccgcctgctggtggctgctcgcgccgccggcgctgctcgcgctcctcacctgctccctggcttttggtttggcttctgaagatacaaagaaagaggtcaagcagtctcaggatttggagaaaagtggtatatcaaggaaaaatgacatagacttaaaaggaattgtattcgtcatccagagtcaaagtaattcttttcatgcaaagagagcagagcagttaaaaaaaagcatcttaaagcaggctgcagatcttacacaggagctccccagtgtcctcctccttcatcagctggctaaacaagaaggtgcatggaccatacttccgttgttaccgcatttttctgtaacatatagcagaaattcatcttggattttcttctgtgaagaagagacaagaatacagattccaaaactcttggaaaccctcagaagatatgacccctctaaggaatggtttttgggaaaagcattacatgatgaagaagctacaataattcaccattatgccttttccgagaatcctacag

SEQ ID NO: 2786 - DNA, 820 bp, Artificial
  cDNA Sequence
gatttattttcatcctagcacatttcagtcactacctgaagttatttgatttactttcttaatttccatttctccactctagggaatggtttttgggaaaagcattacatgatgaagaagctacaataattcaccattatgccttttccgagaatcctacagtttttaagtatccagactttgctgcaggctgggccttaagtattccacttgtaaacaagcttaccaagagactaaagagtgaatccttgaaatccgactttacaatagatttaaaacatgagattgccctctacatctgggacaaaggcggaggacctcccctgaccccagtgcctgagttttgtaccaatgacgtggacttctactgtgctaccacattccattcttttctaccgctttgtagaaagccagtgaagaagaaggatatttttgttgcagtaaaaacatgcaagaaatttcatggtgacagaattaattgagaagaaacacccgtgttctttaataaacctattagagcgaaaaaggactgaaagcctaaaggctgaggaaattgaaagcaaaatttgcacagcctgcaggacccttgctggggactgaggaaagttcttgacctttcctcacagcttcttccagcattatgcaatggaggatattttacccaacagtgtgaacttttagtggctgcaagctgcagggagccctttctgggtacctattgttaagcagacttgggagagccaggcaagtctcattgaatactatagtgactatactgaaaattccattcctactgtggatttgggaattcctaatacag

SEQ ID NO: 2787 - DNA, 554 bp, Artificial
  cDNA Sequence
tctccggacagctggccggcctccccaccatcccggtgtctggggtctctgcaaaaatggggtctgtctccgcccgcccagcctccctttagcgttaaggatcggacaccacctcccggtagtaaattgtgactattccgagttttggagtcattcttcgttgcctgttttattagggcagcaaaacgcctgtggctagggcgggagtgggcggaggcaggtttgagccaatggcacgggagcggccctgtcgctgccatggcaacggcggccgttctccggggaccggctgcccattgggtagaatctttccagaaggctcgagaagaaggaagcggaagtggcacgtggaggggccggtggaggcgccggtcagtcatatcatttggatcaaaaaatagaacaatcggagttgcagccaaaaatcagcaaatcactcatgcaaacaatacggtgtctaacttcaaaagatttcatggccgagcattcaatgaccccttcattcaaaaggagaaggaaaacttgagttacgatttggttccattgaaaaatgg

SEQ ID NO: 2788 - DNA, 665 bp, Artificial
  cDNA Sequence
ggctgaggaagtgggacctccccttttgggtcggtagttcagcgccggcgccggtgtgcgagccgcggcagagtgaggcaggcaacccgaggtgcggagcgacctgcggaggctgagccccgctttctcccagggtttcttatcagccagccgccgctgtccccgggggagtaggaggctcctgacaggccgcggctgtctgtgtgtccttctgagtgtcagaggaacggccagaccccgcgggccggagcagaacgcggccagggcagaaagcggcggcaggagaagcaggcagggggccggaggacgcagaccgagacccgaggcggaggcggaccgcgagccggccatgtcggtggtggggttggacgtgggctcgcagagctgctacatcgcggtagcccgggccgggggcatcgagaccatcgccaatgagttcagcgaccggtgcaccccgtcagtcatatcatttggatcaaaaaatagaacaatcggagttgcagccaaaaatcagcaaatcactcatgcaaacaatacggtgtctaacttcaaaagatttcatggccgagcattcaatgaccccttcattcaaaaggagaaggaaaacttgagttacgatttggttccattgaaaaatggtggagttggaataaaggtaatataat

SEQ ID NO: 2789 - DNA, 586 bp, Artificial
  cDNA Sequence
tttaagtgtgcaatactttccccggcatttaaagttagagaattttccgtcacagatgcagttccttttccaatatctctgatctggaaccatgattcagaagatactgaaggtgttcatgaagtctttagtcgaaaccatgctgctcctttctccaaagttctcacctttctgagaagggggccttttgagctagaagctttctattctgatccccaaggagttccatatccagaagcaaaaataggccgctttgtagttcagaatgtttctgcacagaaagatggagaaaaatctagagtaaaagtcaaagtgcgagtcaacacccatggcattttcaccatctctacggcatctatggtggagaaagtcccaactgaggagaatgaaatgtcttctgaagctgacatggagtgtctgaatcagagaccaccagaaaacccagacactgataaaaatgtccagcaagacaacagtgaagctggaacacagccccaggtacaaactgatgctcaacaaacctcacagtctcccccttcacctgaacttacctcagaagaaaacaaaatcccagatgctgacaaag

SEQ ID NO: 2790 - DNA, 2504 bp, Artificial
  cDNA Sequence
gttgctttgaattacggaatttataagcaggatctcccaagcctggatgagaaacctcggatagtggtttttgttgatatgggacattcagcttttcaagtgtctgcttgtgcttttaacaagggaaaattgaaggtactgggaacagcttttgatcctttcttaggaggaaaaaacttcgatgaaaagttagtggaacatttttgtgcagaatttaaaactaagtacaagttggatgcaaaatccaaaatacgagcactcctacgtctgtatcaggaatgtgaaaaactgaaaaagctaatgagctctaacagcacagaccttccactgaatatcgaatgctttatgaatgataaagatgtttccggaaagatgaacaggtcacaatttgaagaactctgtgctgaacttctgcaaaagatagaagtacccctttattcactgttggaacaaactcatctcaaagtagaagatgtgagtgcagttgagattgttggaggcgctacacgaattccagctgtgaaggaaagaattgccaaattctttggaaaagatattagcacaacactcaatgcagatgaagcagtagccagaggatgtgcattacagtgtgcaatactttccccggcatttaaagttagagaattttccgtcacagatgcagttccttttccaatatctctgatctggaaccatgattcagaagatactgaaggtgttcatgaagtctttagtcgaaaccatgctgctcctttctccaaagttctcacctttctgagaagggggccttttgagctagaagctttctattctgatccccaaggagttccatatccagaagcaaaaataggccgctttgtagttcagaatgtttctgcacagaaagatggagaaaaatctagagtaaaagtcaaagtgcgagtcaacacccatggcattttcaccatctctacggcatctatggtggagaaagtcccaactgaggagaatgaaatgtcttctgaagctgacatggagtgtctgaatcagagaccaccagaaaacccagacactgataaaaatgtccagcaagacaacagtgaagctggaacacagccccaggtacaaactgatgctcaacaaacctcacagtctcccccttcacctgaacttacctcagaagaaaacaaaatcccagatgctgacaaagcaaatgaaaaaaaagttgaccagcctccagaagctaaaaagcccaaaataaaggtggtgaatgttgagctgcctattgaagccaacttggtctggcagttagggaaagaccttcttaacatgtatattgagacagagggtaagatgataatgcaagataaattggaaaaagaaaggaatgatgctaaaaatgcagttgaggaatatgtgtatgagttcagagacaagctgtgtggaccatatgaaaaatttatatgtgagcaggatcatcaaaattttttgagactcctcacagaaactgaagactggctgtatgaagaaggagaggaccaagctaaacaagcatatgttgacaagttggaagaattaatgaaaattggcactccagttaaagttcggtttcaggaagctgaagaacggccaaaaatgtttgaagaactaggacagaggctgcagcattatgccaagatagcagctgacttcagaaataaggatgagaaatacaaccatattgatgagtctgaaatgaaaaaagtggagaagtctgttaatgaagtgatggaatggatgaataatgtcatgaatgctcaggctaaaaagagtcttgatcaggatccagttgtacgtgctcaggaaattaaaacaaaaatcaaggaattgaacaacacatgtgaacccgttgtaacacaaccgaaaccaaaaattgaatcacccaaactggaaagaactccaaatggcccaaatattgataaaaaggaagaagatttagaagacaaaaacaattttggtgctgaacctccacatcagaatgattcctgtggaattgtgaattcatactaagctttctgtgcagtctcaccatttgcatcactgaggatgaaactgacttttgtcttttggagaaaaaaaactgtactgcttgttcaagagggctgtgattaaaatctttaagcatttgttcctgccaaggtagttttcttgcattttgctctccattcagcatgtgtgtgggtgtggatgtttataaacaagactaagtctgacttcataagggctttctaaaaccatttctgtccaagagaaaatgactttttgctttgatattaaaaattcaatgagtaaaacaaaagctagtcaaatgtgttagcagcatgcagaacaaaaactttaaactttctctctcactatacagtatattgtcatgtgaaagtgtggaatggaagaaatgtcgatcctgttgtaactgattgtgaacacttttatgagctttaaaataaagttcatcttatggtgtcatttctaaactgttgattttg

SEQ ID NO: 2791 - DNA, 1825 bp, Artificial
  cDNA Sequence
ccaatatctctgatctggaaccatgattcagaagatactgaagggtattctttagtcgaaaccatgctgctcctttctccaaagttctcacctttctgagaagggggccttttgagctagaagctttctattctgatccccaaggagttccatatccagaagcaaaaataggccgctttgtagttcagaatgtttctgcacagaaagatggagaaaaatctagagtaaaagtcaaagtgcgagtcaacacccatggcattttcaccatctctacggcatctatggtggagaaagtcccaactgaggagaatgaaatgtcttctgaagctgacatggagtgtctgaatcagagaccaccagaaaacccagacactgataaaaatgtccagcaagacaacagtgaagctggaacacagccccaggtacaaactgatgctcaacaaacctcacagtctcccccttcacctgaacttacctcagaagaaaacaaaatcccagatgctgacaaagcaaatgaaaaaaaagttgaccagcctccagaagctaaaaagcccaaaataaaggtggtgaatgttgagctgcctattgaagccaacttggtctggcagttagggaaagaccttcttaacatgtatattgagacagagggtaagatgataatgcaagataaattggaaaaagaaaggaatgatgctaaaaatgcagttgaggaatatgtgtatgagttcagagacaagctgtgtggaccatatgaaaaatttatatgtgagcaggatcatcaaaattttttgagactcctcacagaaactgaagactggctgtatgaagaaggagaggaccaagctaaacaagcatatgttgacaagttggaagaattaatgaaaattggcactccagttaaagttcggtttcaggaagctgaagaacggccaaaaatgtttgaagaactaggacagaggctgcagcattatgccaagatagcagctgacttcagaaataaggatgagaaatacaaccatattgatgagtctgaaatgaaaaaagtggagaagtctgttaatgaagtgatggaatggatgaataatgtcatgaatgctcaggctaaaaagagtcttgatcaggatccagttgtacgtgctcaggaaattaaaacaaaaatcaaggaattgaacaacacatgtgaacccgttgtaacacaaccgaaaccaaaaattgaatcacccaaactggaaagaactccaaatggcccaaatattgataaaaaggaagaagatttagaagacaaaaacaattttggtgctgaacctccacatcagaatgattcctgtggaattgtgaattcatactaagctttctgtgcagtctcaccatttgcatcactgaggatgaaactgacttttgtcttttggagaaaaaaaactgtactgcttgttcaagagggctgtgattaaaatctttaagcatttgttcctgccaaggtagttttcttgcattttgctctccattcagcatgtgtgtgggtgtggatgtttataaacaagactaagtctgacttcataagggctttctaaaaccatttctgtccaagagaaaatgactttttgctttgatattaaaaattcaatgagtaaaacaaaagctagtcaaatgtgttagcagcatgcagaacaaaaactttaaactttctctctcactatacagtatattgtcatgtgaaagtgtggaatggaagaaatgtcgatcctgttgtaactgattgtgaacacttttatgagctttaaaataaagttcatcttatggtgtcatttctaaactgttgattttg

SEQ ID NO: 2792 - DNA, 2504 bp, Artificial; identical to SEQ ID NO: 2790
  cDNA Sequence

SEQ ID NO: 2793 - DNA, 1825 bp, Artificial; identical to SEQ ID NO: 2791
  cDNA Sequence

SEQ ID NO: 2794 - DNA, 1825 bp, Artificial; identical to SEQ ID NO: 2791
  cDNA Sequence

SEQ ID NO: 2795 - DNA, 1825 bp, Artificial; identical to SEQ ID NO: 2791
  cDNA Sequence

SEQ ID NO: 2796 - DNA, 1823 bp, Artificial
  cDNA Sequence
ccaatatctctgatctggaaccatgattcagaagatactgaagggtattctttagtcgaaaccatgctgctcctttctccaaagttctcacctttctgagaagggggccttttgagctagaagctttctattctgatccccaaggagttccatatccagaagcaaaaataggccgctttgtagttcagaatgtttctgcacagaaagatggagaaaaatctagagtaaaagtcaaagtgcgagtcaacacccatggcattttcaccatctctacggcatctatggtggagaaagtcccaactgaggagaatgaaatgtcttctgaagctgacatggagtgtctgaatcagagaccaccagaaaacccagacactgataaaaatgtccagcaagacaacagtgaagctggaacacagccccaggtacaaactgatgctcaacaaacctcacagtctcccccttcacctgaacttacctcagaagaaaacaaaatcccagatgctgacaaagcaaatgaaaaaaaagttgaccagcctccagaagctaaaaagcccaaaataaaggtggtgaatgttgagctgcctattgaagccaacttggtctggcagttagggaaagaccttcttaacatgtatattgagacagagggtaagatgataatgcaagataaattggaaaaagaaaggaatgatgctaaaaatgcagttgaggaatatgtgtatgagttcagagacaagctgtgtggaccatatgaaaaatttatatgtgagcaggatcatcaaaattttttgagactcctcacagaaactgaagactggctgtatgaagaaggagaggaccaagctaaacaagcatatgttgacaagttggaagaattaatgaaaattggcactccagttaaagttcggtttcaggaagctgaagaacggccaaaaatgtttgaagaactaggacagaggctgcagcattatgccaagatagcagctgacttcagaaataaggatgagaaatacaaccatattgatgagtctgaaatgaaaaaagtggagaagtctgttaatgaagtgatggaatggatgaataatgtcatgaatgctcaggctaaaaagagtcttgatcaggatccagttgtacgtgctcaggaaattaaaacaaaaatcaaggaattgaacaacacatgtgaacccgttgtaacacaaccgaaaccaaaaattgaatcacccaaactggaaagaactccaaatggcccaaatattgataaaaaggaagaagatttagaagacaaaaacaattttggtgctgaacctccacatcagaatggtgaatgttaccctaatgagaaaaattctgttaatatggacttggactagataaccttaaattggcctattccttcaattaataaaatatttttgccatagtatgtgactctacataacatactgaaactatttatattttcttttttaaggatatttagaaattttgtgtattatatggaaaaagaaaaaaagcttaagtctgtagtctttatgatcctaaaagggaaaattgccttggtaactttcagattcctgtggaattgtgaattcatactaagctttctgtgcagtctcaccatttgcatcactgaggatgaaactgacttttgtcttttggagaaaaaaaactgtactgcttgttcaagagggctgtgattaaaatctttaagcatttgttcctgccaaggtagttttcttgcattttgctctccattcagcatgtgtgtgggtgtggatgtttataaacaagactaagtctgacttcataagggctttctaaaa

SEQ ID NO: 2797 - DNA, 1823 bp, Artificial; identical to SEQ ID NO: 2796
  cDNA Sequence

SEQ ID NO: 2798 - DNA, 1289 bp, Artificial
  cDNA Sequence
ccaatatctctgatctggaaccatgattcagaagatactgaagggtattctttagtcgaaaccatgctgctcctttctccaaagttctcacctttctgagaagggggccttttgagctagaagctttctattctgatccccaaggagttccatatccagaagcaaaaataggccgctttgtagttcagaatgtttctgcacagaaagatggagaaaaatctagagtaaaagtcaaagtgcgagtcaacacccatggcattttcaccatctctacggcatctatggtggagaaagtcccaactgaggagaatgaaatgtcttctgaagctgacatggagtgtctgaatcagagaccaccagaaaacccagacactgataaaaatgtccagcaagacaacagtgaagctggaacacagccccaggtacaaactgatgctcaacaaacctcacagtctcccccttcacctgaacttacctcagaagaaaacaaaatcccagatgctgacaaagcaaatgaaaaaaaagttgaccagcctccagaagctaaaaagcccaaaataaaggtggtgaatgttgagctgcctattgaagccaacttggtctggcagttagggaaagaccttcttaacatgtatattgagacagagggtaagatgataatgcaagataaattggaaaaagaaaggaatgatgctaaaaatgcagttgaggaatatgtgtatgagttcagagacaagctgtgtggaccatatgaaaaatttatatgtgagcaggatcatcaaaattttttgagactcctcacagaaactgaagactggctgtatgaagaaggagaggaccaagctaaacaagcatatgttgacaagttggaagaattaatgaaaattggcactccagttaaagttcggtttcaggaagctgaagaacggccaaaaatgtttgaagaactaggacagaggctgcagcattatgccaagatagcagctgacttcagaaataaggatgagaaatacaaccatattgatgagtctgaaatgaaaaaagtggagaagtctgttaatgaagtgatggaatggatgaataatgtcatgaatgctcaggctaaaaagagtcttgatcaggatccagttgtacgtgctcaggaaattaaaacaaaaatcaaggtgagtgttactgtctcgtgtttactgctgggttcacttacggactcaagttgcaatcatttgaaccttcaacatagccatttttcctgtaaatcttttacctcatcctaactgaaaccagctttt

SEQ ID NO: 2799 - DNA, 1006 bp, Artificial
  cDNA Sequence
ccaatatctctgatctggaaccatgattcagaagatactgaagggtattctttagtcgaaaccatgctgctcctttctccaaagttctcacctttctgagaagggggccttttgagctagaagctttctattctgatccccaaggagttccatatccagaagcaaaaataggccgctttgtagttcagaatgtttctgcacagaaagatggagaaaaatctagagtaaaagtcaaagtgcgagtcaacacccatggcattttcaccatctctacggcatctatggtggagaaagtcccaactgaggagaatgaaatgtcttctgaagctgacatggagtgtctgaatcagagaccaccagaaaacccagacactgataaaaatgtccagcaagacaacagtgaagctggaacacagccccaggtacaaactgatgctcaacaaacctcacagtctcccccttcacctgaacttacctcagaagaaaacaaaatcccagatgctgacaaagcaaatgaaaaaaaagttgaccagcctccagaagctaaaaagcccaaaataaaggtggtgaatgttgagctgcctattgaagccaacttggtctggcagttagggaaagaccttcttaacatgtatattgagacagagggtaagatgataatgcaagataaattggaaaaagaaaggaatgatgctaaaaatgcagttgaggaatatgtgtatgagttcagagacaagctgtgtggaccatatgaaaaatttatatgtgagcaggatcatcaaaattttttgagactcctcacagaaactgaagactggctgtatgaagaaggagaggaccaagctaaacaagcatatgttgacaagttggaagaattaatgaaaattggcactccagttaaagttcggtttcaggaagctgaagaacggccaaaaatgtttgaagaactaggacagaggctgcagcattatgccaagatagcagctgacttcagaaataaggtgag

SEQ ID NO: 2800 - DNA, 510 bp, Artificial
  cDNA Sequence
ccaatatctctgatctggaaccatgattcagaagatactgaagggtattctttagtcgaaaccatgctgctcctttctccaaagttctcacctttctgagaagggggccttttgagctagaagctttctattctgatccccaaggagttccatatccagaagcaaaaataggccgctttgtagttcagaatgtttctgcacagaaagatggagaaaaatctagagtaaaagtcaaagtgcgagtcaacacccatggcattttcaccatctctacggcatctatggtggagaaagtcccaactgaggagaatgaaatgtcttctgaagctgacatggagtgtctgaatcagagaccaccagaaaacccagacactgataaaaatgtccagcaagacaacagtgaagctggaacacagccccaggtacaaactgatgctcaacaaacctcacagtctcccccttcacctgaacttacctcagaagaaaacaaaatcccagatgctgacaaag

SEQ ID NO: 2801 - DNA, 2504 bp, Artificial; identical to SEQ ID NO: 2790
  cDNA Sequence

SEQ ID NO: 2802 - DNA, 2504 bp, Artificial; identical to SEQ ID NO: 2790
  cDNA Sequence

SEQ ID NO: 2803 - DNA, 2502 bp, Artificial
  cDNA Sequence
gttgctttgaattacggaatttataagcaggatctcccaagcctggatgagaaacctcggatagtggtttttgttgatatgggacattcagcttttcaagtgtctgcttgtgcttttaacaagggaaaattgaaggtactgggaacagcttttgatcctttcttaggaggaaaaaacttcgatgaaaagttagtggaacatttttgtgcagaatttaaaactaagtacaagttggatgcaaaatccaaaatacgagcactcctacgtctgtatcaggaatgtgaaaaactgaaaaagctaatgagctctaacagcacagaccttccactgaatatcgaatgctttatgaatgataaagatgtttccggaaagatgaacaggtcacaatttgaagaactctgtgctgaacttctgcaaaagatagaagtacccctttattcactgttggaacaaactcatctcaaagtagaagatgtgagtgcagttgagattgttggaggcgctacacgaattccagctgtgaaggaaagaattgccaaattctttggaaaagatattagcacaacactcaatgcagatgaagcagtagccagaggatgtgcattacagtgtgcaatactttccccggcatttaaagttagagaattttccgtcacagatgcagttccttttccaatatctctgatctggaaccatgattcagaagatactgaaggtgttcatgaagtctttagtcgaaaccatgctgctcctttctccaaagttctcacctttctgagaagggggccttttgagctagaagctttctattctgatccccaaggagttccatatccagaagcaaaaataggccgctttgtagttcagaatgtttctgcacagaaagatggagaaaaatctagagtaaaagtcaaagtgcgagtcaacacccatggcattttcaccatctctacggcatctatggtggagaaagtcccaactgaggagaatgaaatgtcttctgaagctgacatggagtgtctgaatcagagaccaccagaaaacccagacactgataaaaatgtccagcaagacaacagtgaagctggaacacagccccaggtacaaactgatgctcaacaaacctcacagtctcccccttcacctgaacttacctcagaagaaaacaaaatcccagatgctgacaaagcaaatgaaaaaaaagttgaccagcctccagaagctaaaaagcccaaaataaaggtggtgaatgttgagctgcctattgaagccaacttggtctggcagttagggaaagaccttcttaacatgtatattgagacagagggtaagatgataatgcaagataaattggaaaaagaaaggaatgatgctaaaaatgcagttgaggaatatgtgtatgagttcagagacaagctgtgtggaccatatgaaaaatttatatgtgagcaggatcatcaaaattttttgagactcctcacagaaactgaagactggctgtatgaagaaggagaggaccaagctaaacaagcatatgttgacaagttggaagaattaatgaaaattggcactccagttaaagttcggtttcaggaagctgaagaacggccaaaaatgtttgaagaactaggacagaggctgcagcattatgccaagatagcagctgacttcagaaataaggatgagaaatacaaccatattgatgagtctgaaatgaaaaaagtggagaagtctgttaatgaagtgatggaatggatgaataatgtcatgaatgctcaggctaaaaagagtcttgatcaggatccagttgtacgtgctcaggaaattaaaacaaaaatcaaggaattgaacaacacatgtgaacccgttgtaacacaaccgaaaccaaaaattgaatcacccaaactggaaagaactccaaatggcccaaatattgataaaaaggaagaagatttagaagacaaaaacaattttggtgctgaacctccacatcagaatggtgaatgttaccctaatgagaaaaattctgttaatatggacttggactagataaccttaaattggcctattccttcaattaataaaatatttttgccatagtatgtgactctacataacatactgaaactatttatattttcttttttaaggatatttagaaattttgtgtattatatggaaaaagaaaaaaagcttaagtctgtagtctttatgatcctaaaagggaaaattgccttggtaactttcagattcctgtggaattgtgaattcatactaagctttctgtgcagtctcaccatttgcatcactgaggatgaaactgacttttgtcttttggagaaaaaaaactgtactgcttgttcaagagggctgtgattaaaatctttaagcatttgttcctgccaaggtagttttcttgcattttgctctccattcagcatgtgtgtgggtgtggatgtttataaacaagactaagtctgacttcataagggctttctaaaa

SEQ ID NO: 2804 - DNA, 1789 bp, Artificial
  cDNA Sequence
gtgttcatgaagtctttagtcgaaaccatgctgctcctttctccaaagttctcacctttctgagaagggggccttttgagctagaagctttctattctgatccccaaggagttccatatccagaagcaaaaataggccgctttgtagttcagaatgtttctgcacagaaagatggagaaaaatctagagtaaaagtcaaagtgcgagtcaacacccatggcattttcaccatctctacggcatctatggtggagaaagtcccaactgaggagaatgaaatgtcttctgaagctgacatggagtgtctgaatcagagaccaccagaaaacccagacactgataaaaatgtccagcaagacaacagtgaagctggaacacagccccaggtacaaactgatgctcaacaaacctcacagtctcccccttcacctgaacttacctcagaagaaaacaaaatcccagatgctgacaaagcaaatgaaaaaaaagttgaccagcctccagaagctaaaaagcccaaaataaaggtggtgaatgttgagctgcctattgaagccaacttggtctggcagttagggaaagaccttcttaacatgtatattgagacagagggtaagatgataatgcaagataaattggaaaaagaaaggaatgatgctaaaaatgcagttgaggaatatgtgtatgagttcagagacaagctgtgtggaccatatgaaaaatttatatgtgagcaggatcatcaaaattttttgagactcctcacagaaactgaagactggctgtatgaagaaggagaggaccaagctaaacaagcatatgttgacaagttggaagaattaatgaaaattggcactccagttaaagttcggtttcaggaagctgaagaacggccaaaaatgtttgaagaactaggacagaggctgcagcattatgccaagatagcagctgacttcagaaataaggatgagaaatacaaccatattgatgagtctgaaatgaaaaaagtggagaagtctgttaatgaagtgatggaatggatgaataatgtcatgaatgctcaggctaaaaagagtcttgatcaggatccagttgtacgtgctcaggaaattaaaacaaaaatcaaggaattgaacaacacatgtgaacccgttgtaacacaaccgaaaccaaaaattgaatcacccaaactggaaagaactccaaatggcccaaatattgataaaaaggaagaagatttagaagacaaaaacaattttggtgctgaacctccacatcagaatgattcctgtggaattgtgaattcatactaagctttctgtgcagtctcaccatttgcatcactgaggatgaaactgacttttgtcttttggagaaaaaaaactgtactgcttgttcaagagggctgtgattaaaatctttaagcatttgttcctgccaaggtagttttcttgcattttgctctccattcagcatgtgtgtgggtgtggatgtttataaacaagactaagtctgacttcataagggctttctaaaaccatttctgtccaagagaaaatgactttttgctttgatattaaaaattcaatgagtaaaacaaaagctagtcaaatgtgttagcagcatgcagaacaaaaactttaaactttctctctcactatacagtatattgtcatgtgaaagtgtggaatggaagaaatgtcgatcctgttgtaactgattgtgaacacttttatgagctttaaaataaagttcatcttatggtgtcatttctaaactgttgattttg

SEQ ID NO: 2805 - DNA, 2502 bp, Artificial; identical to SEQ ID NO: 2803
  cDNA Sequence

SEQ ID NO: 2806 - DNA, 1789 bp, Artificial; identical to SEQ ID NO: 2804
  cDNA Sequence

SEQ ID NO: 2807 - DNA, 1968 bp, Artificial
  cDNA Sequence
gttgctttgaattacggaatttataagcaggatctcccaagcctggatgagaaacctcggatagtggtttttgttgatatgggacattcagcttttcaagtgtctgcttgtgcttttaacaagggaaaattgaaggtactgggaacagcttttgatcctttcttaggaggaaaaaacttcgatgaaaagttagtggaacatttttgtgcagaatttaaaactaagtacaagttggatgcaaaatccaaaatacgagcactcctacgtctgtatcaggaatgtgaaaaactgaaaaagctaatgagctctaacagcacagaccttccactgaatatcgaatgctttatgaatgataaagatgtttccggaaagatgaacaggtcacaatttgaagaactctgtgctgaacttctgcaaaagatagaagtacccctttattcactgttggaacaaactcatctcaaagtagaagatgtgagtgcagttgagattgttggaggcgctacacgaattccagctgtgaaggaaagaattgccaaattctttggaaaagatattagcacaacactcaatgcagatgaagcagtagccagaggatgtgcattacagtgtgcaatactttccccggcatttaaagttagagaattttccgtcacagatgcagttccttttccaatatctctgatctggaaccatgattcagaagatactgaaggtgttcatgaagtctttagtcgaaaccatgctgctcctttctccaaagttctcacctttctgagaagggggccttttgagctagaagctttctattctgatccccaaggagttccatatccagaagcaaaaataggccgctttgtagttcagaatgtttctgcacagaaagatggagaaaaatctagagtaaaagtcaaagtgcgagtcaacacccatggcattttcaccatctctacggcatctatggtggagaaagtcccaactgaggagaatgaaatgtcttctgaagctgacatggagtgtctgaatcagagaccaccagaaaacccagacactgataaaaatgtccagcaagacaacagtgaagctggaacacagccccaggtacaaactgatgctcaacaaacctcacagtctcccccttcacctgaacttacctcagaagaaaacaaaatcccagatgctgacaaagcaaatgaaaaaaaagttgaccagcctccagaagctaaaaagcccaaaataaaggtggtgaatgttgagctgcctattgaagccaacttggtctggcagttagggaaagaccttcttaacatgtatattgagacagagggtaagatgataatgcaagataaattggaaaaagaaaggaatgatgctaaaaatgcagttgaggaatatgtgtatgagttcagagacaagctgtgtggaccatatgaaaaatttatatgtgagcaggatcatcaaaattttttgagactcctcacagaaactgaagactggctgtatgaagaaggagaggaccaagctaaacaagcatatgttgacaagttggaagaattaatgaaaattggcactccagttaaagttcggtttcaggaagctgaagaacggccaaaaatgtttgaagaactaggacagaggctgcagcattatgccaagatagcagctgacttcagaaataaggatgagaaatacaaccatattgatgagtctgaaatgaaaaaagtggagaagtctgttaatgaagtgatggaatggatgaataatgtcatgaatgctcaggctaaaaagagtcttgatcaggatccagttgtacgtgctcaggaaattaaaacaaaaatcaaggtgagtgttactgtctcgtgtttactgctgggttcacttacggactcaagttgcaatcatttgaaccttcaacatagccatttttcctgtaaatcttttacctcatcctaactgaaaccagctttt

SEQ ID NO: 2808 - DNA, 1789 bp, Artificial; identical to SEQ ID NO: 2804
  cDNA Sequence

SEQ ID NO: 2809 - DNA, 1789 bp, Artificial; identical to SEQ ID NO: 2804
  cDNA Sequence

SEQ ID NO: 2810 - DNA, 1787 bp, Artificial
  cDNA Sequence
gtgttcatgaagtctttagtcgaaaccatgctgctcctttctccaaagttctcacctttctgagaagggggccttttgagctagaagctttctattctgatccccaaggagttccatatccagaagcaaaaataggccgctttgtagttcagaatgtttctgcacagaaagatggagaaaaatctagagtaaaagtcaaagtgcgagtcaacacccatggcattttcaccatctctacggcatctatggtggagaaagtcccaactgaggagaatgaaatgtcttctgaagctgacatggagtgtctgaatcagagaccaccagaaaacccagacactgataaaaatgtccagcaagacaacagtgaagctggaacacagccccaggtacaaactgatgctcaacaaacctcacagtctcccccttcacctgaacttacctcagaagaaaacaaaatcccagatgctgacaaagcaaatgaaaaaaaagttgaccagcctccagaagctaaaaagcccaaaataaaggtggtgaatgttgagctgcctattgaagccaacttggtctggcagttagggaaagaccttcttaacatgtatattgagacagagggtaagatgataatgcaagataaattggaaaaagaaaggaatgatgctaaaaatgcagttgaggaatatgtgtatgagttcagagacaagctgtgtggaccatatgaaaaatttatatgtgagcaggatcatcaaaattttttgagactcctcacagaaactgaagactggctgtatgaagaaggagaggaccaagctaaacaagcatatgttgacaagttggaagaattaatgaaaattggcactccagttaaagttcggtttcaggaagctgaagaacggccaaaaatgtttgaagaactaggacagaggctgcagcattatgccaagatagcagctgacttcagaaataaggatgagaaatacaaccatattgatgagtctgaaatgaaaaaagtggagaagtctgttaatgaagtgatggaatggatgaataatgtcatgaatgctcaggctaaaaagagtcttgatcaggatccagttgtacgtgctcaggaaattaaaacaaaaatcaaggaattgaacaacacatgtgaacccgttgtaacacaaccgaaaccaaaaattgaatcacccaaactggaaagaactccaaatggcccaaatattgataaaaaggaagaagatttagaagacaaaaacaattttggtgctgaacctccacatcagaatggtgaatgttaccctaatgagaaaaattctgttaatatggacttggactagataaccttaaattggcctattccttcaattaataaaatatttttgccatagtatgtgactctacataacatactgaaactatttatattttcttttttaaggatatttagaaattttgtgtattatatggaaaaagaaaaaaagcttaagtctgtagtctttatgatcctaaaagggaaaattgccttggtaactttcagattcctgtggaattgtgaattcatactaagctttctgtgcagtctcaccatttgcatcactgaggatgaaactgacttttgtcttttggagaaaaaaaactgtactgcttgttcaagagggctgtgattaaaatctttaagcatttgttcctgccaaggtagttttcttgcattttgctctccattcagcatgtgtgtgggtgtggatgtttataaacaagactaagtctgacttcataagggctttctaaaa

SEQ ID NO: 2811 - DNA, 1787 bp, Artificial; identical to SEQ ID NO: 2810
  cDNA Sequence

SEQ ID NO: 2812 - DNA, 1253 bp, Artificial
  cDNA Sequence
gtgttcatgaagtctttagtcgaaaccatgctgctcctttctccaaagttctcacctttctgagaagggggccttttgagctagaagctttctattctgatccccaaggagttccatatccagaagcaaaaataggccgctttgtagttcagaatgtttctgcacagaaagatggagaaaaatctagagtaaaagtcaaagtgcgagtcaacacccatggcattttcaccatctctacggcatctatggtggagaaagtcccaactgaggagaatgaaatgtcttctgaagctgacatggagtgtctgaatcagagaccaccagaaaacccagacactgataaaaatgtccagcaagacaacagtgaagctggaacacagccccaggtacaaactgatgctcaacaaacctcacagtctcccccttcacctgaacttacctcagaagaaaacaaaatcccagatgctgacaaagcaaatgaaaaaaaagttgaccagcctccagaagctaaaaagcccaaaataaaggtggtgaatgttgagctgcctattgaagccaacttggtctggcagttagggaaagaccttcttaacatgtatattgagacagagggtaagatgataatgcaagataaattggaaaaagaaaggaatgatgctaaaaatgcagttgaggaatatgtgtatgagttcagagacaagctgtgtggaccatatgaaaaatttatatgtgagcaggatcatcaaaattttttgagactcctcacagaaactgaagactggctgtatgaagaaggagaggaccaagctaaacaagcatatgttgacaagttggaagaattaatgaaaattggcactccagttaaagttcggtttcaggaagctgaagaacggccaaaaatgtttgaagaactaggacagaggctgcagcattatgccaagatagcagctgacttcagaaataaggatgagaaatacaaccatattgatgagtctgaaatgaaaaaagtggagaagtctgttaatgaagtgatggaatggatgaataatgtcatgaatgctcaggctaaaaagagtcttgatcaggatccagttgtacgtgctcaggaaattaaaacaaaaatcaaggtgagtgttactgtctcgtgtttactgctgggttcacttacggactcaagttgcaatcatttgaaccttcaacatagccatttttcctgtaaatcttttacctcatcctaactgaaaccagctttt

SEQ ID NO: 2813 - DNA, 965 bp, Artificial
  cDNA Sequence
gtgttcatgaagtctttagtcgaaaccatgctgctcctttctccaaagttctcacctttctgagaagggggccttttgagctagaagctttctattctgatccccaaggagttccatatccagaagcaaaaataggccgctttgtagttcagaatgtttctgcacagaaagatggagaaaaatctagagtaaaagtcaaagtgcgagtcaacacccatggcattttcaccatctctacggcatctatggtggagaaagtcccaactgaggagaatgaaatgtcttctgaagctgacatggagtgtctgaatcagagaccaccagaaaacccagacactgatgcaaatgaaaaaaaagttgaccagcctccagaagctaaaaagcccaaaataaaggtggtgaatgttgagctgcctattgaagccaacttggtctggcagttagggaaagaccttcttaacatgtatattgagacagagggtaagatgataatgcaagataaattggaaaaagaaaggaatgatgctaaaaatgcagttgaggaatatgtgtatgagttcagagacaagctgtgtggaccatatgaaaaatttatatgtgagcaggatcatcaaaattttttgagactcctcacagaaactgaagactggctgtatgaagaaggagaggaccaagctaaacaagcatatgttgacaagttggaagaattaatgaaaattggcactccagttaaagttcggtttcaggaagctgaagaacggccaaaaatgtttgaagaactaggacagaggctgcagcattatgccaagatagcagctgacttcagaaataaggatgagaaatacaaccatattgatgagtctgaaatgaaaaaagtggagaagtctgttaatgaagtgatggaatggatgaataatgtcatgaatgctcaggctaaaaagagtcttgatcaggatccagttgta

SEQ ID NO: 2814 - DNA, 970 bp, Artificial
  cDNA Sequence
gtgttcatgaagtctttagtcgaaaccatgctgctcctttctccaaagttctcacctttctgagaagggggccttttgagctagaagctttctattctgatccccaaggagttccatatccagaagcaaaaataggccgctttgtagttcagaatgtttctgcacagaaagatggagaaaaatctagagtaaaagtcaaagtgcgagtcaacacccatggcattttcaccatctctacggcatctatggtggagaaagtcccaactgaggagaatgaaatgtcttctgaagctgacatggagtgtctgaatcagagaccaccagaaaacccagacactgataaaaatgtccagcaagacaacagtgaagctggaacacagccccaggtacaaactgatgctcaacaaacctcacagtctcccccttcacctgaacttacctcagaagaaaacaaaatcccagatgctgacaaagcaaatgaaaaaaaagttgaccagcctccagaagctaaaaagcccaaaataaaggtggtgaatgttgagctgcctattgaagccaacttggtctggcagttagggaaagaccttcttaacatgtatattgagacagagggtaagatgataatgcaagataaattggaaaaagaaaggaatgatgctaaaaatgcagttgaggaatatgtgtatgagttcagagacaagctgtgtggaccatatgaaaaatttatatgtgagcaggatcatcaaaattttttgagactcctcacagaaactgaagactggctgtatgaagaaggagaggaccaagctaaacaagcatatgttgacaagttggaagaattaatgaaaattggcactccagttaaagttcggtttcaggaagctgaagaacggccaaaaatgtttgaagaactaggacagaggctgcagcattatgccaagatagcagctgacttcagaaataaggtgag

SEQ ID NO: 2815 - DNA, 838 bp, Artificial
  cDNA Sequence
gtgttcatgaagtctttagtcgaaaccatgctgctcctttctccaaagttctcacctttctgagaagggggccttttgagctagaagctttctattctgatccccaaggagttccatatccagaagcaaaaataggccgctttgtagttcagaatgtttctgcacagaaagatggagaaaaatctagagtaaaagtcaaagtgcgagtcaacacccatggcattttcaccatctctacggcatctatggtggagaaagtcccaactgaggagaatgaaatgtcttctgaagctgacatggagtgtctgaatcagagaccaccagaaaacccagacactgatgcaaatgaaaaaaaagttgaccagcctccagaagctaaaaagcccaaaataaaggtggtgaatgttgagctgcctattgaagccaacttggtctggcagttagggaaagaccttcttaacatgtatattgagacagagggtaagatgataatgcaagataaattggaaaaagaaaggaatgatgctaaaaatgcagttgaggaatatgtgtatgagttcagagacaagctgtgtggaccatatgaaaaatttatatgtgagcaggatcatcaaaattttttgagactcctcacagaaactgaagactggctgtatgaagaaggagaggaccaagctaaacaagcatatgttgacaagttggaagaattaatgaaaattggcactccagttaaagttcggtttcaggaagctgaagaacggccaaaaatgtttgaagaactaggacagaggctgcagcattatgccaagatagcagctgacttcagaaataaggtgag

SEQ ID NO: 2816 - DNA, 1680 bp, Artificial
  cDNA Sequence
gttgctttgaattacggaatttataagcaggatctcccaagcctggatgagaaacctcggatagtggtttttgttgatatgggacattcagcttttcaagtgtctgcttgtgcttttaacaagggaaaattgaaggtactgggaacagcttttgatcctttcttaggaggaaaaaacttcgatgaaaagttagtggaacatttttgtgcagaatttaaaactaagtacaagttggatgcaaaatccaaaatacgagcactcctacgtctgtatcaggaatgtgaaaaactgaaaaagctaatgagctctaacagcacagaccttccactgaatatcgaatgctttatgaatgataaagatgtttccggaaagatgaacaggtcacaatttgaagaactctgtgctgaacttctgcaaaagatagaagtacccctttattcactgttggaacaaactcatctcaaagtagaagatgtgagtgcagttgagattgttggaggcgctacacgaattccagctgtgaaggaaagaattgccaaattctttggaaaagatattagcacaacactcaatgcagatgaagcagtagccagaggatgtgcattacagtgtgcaatactttccccggcatttaaagttagagaattttccgtcacagatgcagttccttttccaatatctctgatctggaaccatgattcagaagatactgaaggtgttcatgaagtctttagtcgaaaccatgctgctcctttctccaaagttctcacctttctgagaagggggccttttgagctagaagctttctattctgatccccaaggagttccatatccagaagcaaaaataggccgctttgtagttcagaatgtttctgcacagaaagatggagaaaaatctagagtaaaagtcaaagtgcgagtcaacacccatggcattttcaccatctctacggcatctatggtggagaaagtcccaactgaggagaatgaaatgtcttctgaagctgacatggagtgtctgaatcagagaccaccagaaaacccagacactgatgcaaatgaaaaaaaagttgaccagcctccagaagctaaaaagcccaaaataaaggtggtgaatgttgagctgcctattgaagccaacttggtctggcagttagggaaagaccttcttaacatgtatattgagacagagggtaagatgataatgcaagataaattggaaaaagaaaggaatgatgctaaaaatgcagttgaggaatatgtgtatgagttcagagacaagctgtgtggaccatatgaaaaatttatatgtgagcaggatcatcaaaattttttgagactcctcacagaaactgaagactggctgtatgaagaaggagaggaccaagctaaacaagcatatgttgacaagttggaagaattaatgaaaattggcactccagttaaagttcggtttcaggaagctgaagaacggccaaaaatgtttgaagaactaggacagaggctgcagcattatgccaagatagcagctgacttcagaaataaggatgagaaatacaaccatattgatgagtctgaaatgaaaaaagtggagaagtctgttaatgaagtgatggaatggatgaataatgtcatgaatgctcaggctaaaaagagtcttgatcaggatccagttgta

SEQ ID NO: 2817 - DNA, 1685 bp, Artificial
  cDNA Sequence
gttgctttgaattacggaatttataagcaggatctcccaagcctggatgagaaacctcggatagtggtttttgttgatatgggacattcagcttttcaagtgtctgcttgtgcttttaacaagggaaaattgaaggtactgggaacagcttttgatcctttcttaggaggaaaaaacttcgatgaaaagttagtggaacatttttgtgcagaatttaaaactaagtacaagttggatgcaaaatccaaaatacgagcactcctacgtctgtatcaggaatgtgaaaaactgaaaaagctaatgagctctaacagcacagaccttccactgaatatcgaatgctttatgaatgataaagatgtttccggaaagatgaacaggtcacaatttgaagaactctgtgctgaacttctgcaaaagatagaagtacccctttattcactgttggaacaaactcatctcaaagtagaagatgtgagtgcagttgagattgttggaggcgctacacgaattccagctgtgaaggaaagaattgccaaattctttggaaaagatattagcacaacactcaatgcagatgaagcagtagccagaggatgtgcattacagtgtgcaatactttccccggcatttaaagttagagaattttccgtcacagatgcagttccttttccaatatctctgatctggaaccatgattcagaagatactgaaggtgttcatgaagtctttagtcgaaaccatgctgctcctttctccaaagttctcacctttctgagaagggggccttttgagctagaagctttctattctgatccccaaggagttccatatccagaagcaaaaataggccgctttgtagttcagaatgtttctgcacagaaagatggagaaaaatctagagtaaaagtcaaagtgcgagtcaacacccatggcattttcaccatctctacggcatctatggtggagaaagtcccaactgaggagaatgaaatgtcttctgaagctgacatggagtgtctgaatcagagaccaccagaaaacccagacactgataaaaatgtccagcaagacaacagtgaagctggaacacagccccaggtacaaactgatgctcaacaaacctcacagtctcccccttcacctgaacttacctcagaagaaaacaaaatcccagatgctgacaaagcaaatgaaaaaaaagttgaccagcctccagaagctaaaaagcccaaaataaaggtggtgaatgttgagctgcctattgaagccaacttggtctggcagttagggaaagaccttcttaacatgtatattgagacagagggtaagatgataatgcaagataaattggaaaaagaaaggaatgatgctaaaaatgcagttgaggaatatgtgtatgagttcagagacaagctgtgtggaccatatgaaaaatttatatgtgagcaggatcatcaaaattttttgagactcctcacagaaactgaagactggctgtatgaagaaggagaggaccaagctaaacaagcatatgttgacaagttggaagaattaatgaaaattggcactccagttaaagttcggtttcaggaagctgaagaacggccaaaaatgtttgaagaactaggacagaggctgcagcattatgccaagatagcagctgacttcagaaataaggtgag

SEQ ID NO: 2818 - DNA, 1553 bp, Artificial
  cDNA Sequence
gttgctttgaattacggaatttataagcaggatctcccaagcctggatgagaaacctcggatagtggtttttgttgatatgggacattcagcttttcaagtgtctgcttgtgcttttaacaagggaaaattgaaggtactgggaacagcttttgatcctttcttaggaggaaaaaacttcgatgaaaagttagtggaacatttttgtgcagaatttaaaactaagtacaagttggatgcaaaatccaaaatacgagcactcctacgtctgtatcaggaatgtgaaaaactgaaaaagctaatgagctctaacagcacagaccttccactgaatatcgaatgctttatgaatgataaagatgtttccggaaagatgaacaggtcacaatttgaagaactctgtgctgaacttctgcaaaagatagaagtacccctttattcactgttggaacaaactcatctcaaagtagaagatgtgagtgcagttgagattgttggaggcgctacacgaattccagctgtgaaggaaagaattgccaaattctttggaaaagatattagcacaacactcaatgcagatgaagcagtagccagaggatgtgcattacagtgtgcaatactttccccggcatttaaagttagagaattttccgtcacagatgcagttccttttccaatatctctgatctggaaccatgattcagaagatactgaaggtgttcatgaagtctttagtcgaaaccatgctgctcctttctccaaagttctcacctttctgagaagggggccttttgagctagaagctttctattctgatccccaaggagttccatatccagaagcaaaaataggccgctttgtagttcagaatgtttctgcacagaaagatggagaaaaatctagagtaaaagtcaaagtgcgagtcaacacccatggcattttcaccatctctacggcatctatggtggagaaagtcccaactgaggagaatgaaatgtcttctgaagctgacatggagtgtctgaatcagagaccaccagaaaacccagacactgatgcaaatgaaaaaaaagttgaccagcctccagaagctaaaaagcccaaaataaaggtggtgaatgttgagctgcctattgaagccaacttggtctggcagttagggaaagaccttcttaacatgtatattgagacagagggtaagatgataatgcaagataaattggaaaaagaaaggaatgatgctaaaaatgcagttgaggaatatgtgtatgagttcagagacaagctgtgtggaccatatgaaaaatttatatgtgagcaggatcatcaaaattttttgagactcctcacagaaactgaagactggctgtatgaagaaggagaggaccaagctaaacaagcatatgttgacaagttggaagaattaatgaaaattggcactccagttaaagttcggtttcaggaagctgaagaacggccaaaaatgtttgaagaactaggacagaggctgcagcattatgccaagatagcagctgacttcagaaataaggtgag

SEQ ID NO: 2819 - DNA, 1189 bp, Artificial
  cDNA Sequence
gttgctttgaattacggaatttataagcaggatctcccaagcctggatgagaaacctcggatagtggtttttgttgatatgggacattcagcttttcaagtgtctgcttgtgcttttaacaagggaaaattgaaggtactgggaacagcttttgatcctttcttaggaggaaaaaacttcgatgaaaagttagtggaacatttttgtgcagaatttaaaactaagtacaagttggatgcaaaatccaaaatacgagcactcctacgtctgtatcaggaatgtgaaaaactgaaaaagctaatgagctctaacagcacagaccttccactgaatatcgaatgctttatgaatgataaagatgtttccggaaagatgaacaggtcacaatttgaagaactctgtgctgaacttctgcaaaagatagaagtacccctttattcactgttggaacaaactcatctcaaagtagaagatgtgagtgcagttgagattgttggaggcgctacacgaattccagctgtgaaggaaagaattgccaaattctttggaaaagatattagcacaacactcaatgcagatgaagcagtagccagaggatgtgcattacagtgtgcaatactttccccggcatttaaagttagagaattttccgtcacagatgcagttccttttccaatatctctgatctggaaccatgattcagaagatactgaaggtgttcatgaagtctttagtcgaaaccatgctgctcctttctccaaagttctcacctttctgagaagggggccttttgagctagaagctttctattctgatccccaaggagttccatatccagaagcaaaaataggccgctttgtagttcagaatgtttctgcacagaaagatggagaaaaatctagagtaaaagtcaaagtgcgagtcaacacccatggcattttcaccatctctacggcatctatggtggagaaagtcccaactgaggagaatgaaatgtcttctgaagctgacatggagtgtctgaatcagagaccaccagaaaacccagacactgataaaaatgtccagcaagacaacagtgaagctggaacacagccccaggtacaaactgatgctcaacaaacctcacagtctcccccttcacctgaacttacctcagaagaaaacaaaatcccagatgctgacaaag

SEQ ID NO: 2820 - DNA, 1302 bp, Artificial
  cDNA Sequence
aggtcacaatttgaagaactctgtgctgaacttctgcaaaagatagaagtacccctttattcactgttggaacaaactcatctcaaagtagaagatgtgagtgcagttgagattgttggaggcgctacacgaattccagctgtgaaggaaagaattgccaaattctttggaaaagatattagcacaacactcaatgcagatgaagcagtagccagaggatgtgcattacagtgtgcaatactttccccggcatttaaagttagagaattttccgtcacagatgcagttccttttccaatatctctgatctggaaccatgattcagaagatactgaaggtgttcatgaagtctttagtcgaaaccatgctgctcctttctccaaagttctcacctttctgagaagggggccttttgagctagaagctttctattctgatccccaaggagttccatatccagaagcaaaaataggccgctttgtagttcagaatgtttctgcacagaaagatggagaaaaatctagagtaaaagtcaaagtgcgagtcaacacccatggcattttcaccatctctacggcatctatggtggagaaagtcccaactgaggagaatgaaatgtcttctgaagctgacatggagtgtctgaatcagagaccaccagaaaacccagacactgatgcaaatgaaaaaaaagttgaccagcctccagaagctaaaaagcccaaaataaaggtggtgaatgttgagctgcctattgaagccaacttggtctggcagttagggaaagaccttcttaacatgtatattgagacagagggtaagatgataatgcaagataaattggaaaaagaaaggaatgatgctaaaaatgcagttgaggaatatgtgtatgagttcagagacaagctgtgtggaccatatgaaaaatttatatgtgagcaggatcatcaaaattttttgagactcctcacagaaactgaagactggctgtatgaagaaggagaggaccaagctaaacaagcatatgttgacaagttggaagaattaatgaaaattggcactccagttaaagttcggtttcaggaagctgaagaacggccaaaaatgtttgaagaactaggacagaggctgcagcattatgccaagatagcagctgacttcagaaataaggatgagaaatacaaccatattgatgagtctgaaatgaaaaaagtggagaagtctgttaatgaagtgatggaatggatgaataatgtcatgaatgctcaggctaaaaagagtcttgatcaggatccagttgta

SEQ ID NO: 2821 - DNA, 1175 bp, Artificial
  cDNA Sequence
aggtcacaatttgaagaactctgtgctgaacttctgcaaaagatagaagtacccctttattcactgttggaacaaactcatctcaaagtagaagatgtgagtgcagttgagattgttggaggcgctacacgaattccagctgtgaaggaaagaattgccaaattctttggaaaagatattagcacaacactcaatgcagatgaagcagtagccagaggatgtgcattacagtgtgcaatactttccccggcatttaaagttagagaattttccgtcacagatgcagttccttttccaatatctctgatctggaaccatgattcagaagatactgaaggtgttcatgaagtctttagtcgaaaccatgctgctcctttctccaaagttctcacctttctgagaagggggccttttgagctagaagctttctattctgatccccaaggagttccatatccagaagcaaaaataggccgctttgtagttcagaatgtttctgcacagaaagatggagaaaaatctagagtaaaagtcaaagtgcgagtcaacacccatggcattttcaccatctctacggcatctatggtggagaaagtcccaactgaggagaatgaaatgtcttctgaagctgacatggagtgtctgaatcagagaccaccagaaaacccagacactgatgcaaatgaaaaaaaagttgaccagcctccagaagctaaaaagcccaaaataaaggtggtgaatgttgagctgcctattgaagccaacttggtctggcagttagggaaagaccttcttaacatgtatattgagacagagggtaagatgataatgcaagataaattggaaaaagaaaggaatgatgctaaaaatgcagttgaggaatatgtgtatgagttcagagacaagctgtgtggaccatatgaaaaatttatatgtgagcaggatcatcaaaattttttgagactcctcacagaaactgaagactggctgtatgaagaaggagaggaccaagctaaacaagcatatgttgacaagttggaagaattaatgaaaattggcactccagttaaagttcggtttcaggaagctgaagaacggccaaaaatgtttgaagaactaggacagaggctgcagcattatgccaagatagcagctgacttcagaaataaggtgag

SEQ ID NO: 2822 - DNA, 811 bp, Artificial
  cDNA Sequence
aggtcacaatttgaagaactctgtgctgaacttctgcaaaagatagaagtacccctttattcactgttggaacaaactcatctcaaagtagaagatgtgagtgcagttgagattgttggaggcgctacacgaattccagctgtgaaggaaagaattgccaaattctttggaaaagatattagcacaacactcaatgcagatgaagcagtagccagaggatgtgcattacagtgtgcaatactttccccggcatttaaagttagagaattttccgtcacagatgcagttccttttccaatatctctgatctggaaccatgattcagaagatactgaaggtgttcatgaagtctttagtcgaaaccatgctgctcctttctccaaagttctcacctttctgagaagggggccttttgagctagaagctttctattctgatccccaaggagttccatatccagaagcaaaaataggccgctttgtagttcagaatgtttctgcacagaaagatggagaaaaatctagagtaaaagtcaaagtgcgagtcaacacccatggcattttcaccatctctacggcatctatggtggagaaagtcccaactgaggagaatgaaatgtcttctgaagctgacatggagtgtctgaatcagagaccaccagaaaacccagacactgataaaaatgtccagcaagacaacagtgaagctggaacacagccccaggtacaaactgatgctcaacaaacctcacagtctcccccttcacctgaacttacctcagaagaaaacaaaatcccagatgctgacaaag

SEQ ID NO: 2823 - DNA, 473 bp, Artificial
  cDNA Sequence
aggtcacaatttgaagaactctgtgctgaacttctgcaaaagatagaagtacccctttattcactgttggaacaaactcatctcaaagtagaagatgtgagtgcagttgagattgttggaggcgctacacgaattccagctgtgaaggaaagaattgccaaattctttggaaaagatattagcacaacactcaatgcagatgaagcagtagccagaggatgtgcattacagtgtgcaatactttccccggcatttaaagttagagaattttccgtcacagatgcagttccttttccaatatctctgatctggaaccatgattcagaagatactgaaggtgttcatgaagtctttagtcgaaaccatgctgctcctttctccaaagttctcacctttctgagaagggggccttttgagctagaagctttctattctgatccccaaggagttccatatccagaagcaaaaatagg

SEQ ID NO: 2824 - DNA, 474 bp, Artificial
  cDNA Sequence
gtgttcatgaagtctttagtcgaaaccatgctgctcctttctccaaagttctcacctttctgagaagggggccttttgagctagaagctttctattctgatccccaaggagttccatatccagaagcaaaaataggccgctttgtagttcagaatgtttctgcacagaaagatggagaaaaatctagagtaaaagtcaaagtgcgagtcaacacccatggcattttcaccatctctacggcatctatggtggagaaagtcccaactgaggagaatgaaatgtcttctgaagctgacatggagtgtctgaatcagagaccaccagaaaacccagacactgataaaaatgtccagcaagacaacagtgaagctggaacacagccccaggtacaaactgatgctcaacaaacctcacagtctcccccttcacctgaacttacctcagaagaaaacaaaatcccagatgctgacaaag

SEQ ID NO: 2825 - DNA, 1127 bp, Artificial
  cDNA Sequence
gagaatacctctttgttttgttgtgaaaaattctgaagtacgagtgccactaatattgtcatattttgtgttaaggatcatcaaaattttttgagactcctcacagaaactgaagactggctgtatgaagaaggagaggaccaagctaaacaagcatatgttgacaagttggaagaattaatgaaaattggcactccagttaaagttcggtttcaggaagctgaagaacggccaaaaatgtttgaagaactaggacagaggctgcagcattatgccaagatagcagctgacttcagaaataaggatgagaaatacaaccatattgatgagtctgaaatgaaaaaagtggagaagtctgttaatgaagtgatggaatggatgaataatgtcatgaatgctcaggctaaaaagagtcttgatcaggatccagttgtacgtgctcaggaaattaaaacaaaaatcaaggaattgaacaacacatgtgaacccgttgtaacacaaccgaaaccaaaaattgaatcacccaaactggaaagaactccaaatggcccaaatattgataaaaaggaagaagatttagaagacaaaaacaattttggtgctgaacctccacatcagaatgattcctgtggaattgtgaattcatactaagctttctgtgcagtctcaccatttgcatcactgaggatgaaactgacttttgtcttttggagaaaaaaaactgtactgcttgttcaagagggctgtgattaaaatctttaagcatttgttcctgccaaggtagttttcttgcattttgctctccattcagcatgtgtgtgggtgtggatgtttataaacaagactaagtctgacttcataagggctttctaaaaccatttctgtccaagagaaaatgactttttgctttgatattaaaaattcaatgagtaaaacaaaagctagtcaaatgtgttagcagcatgcagaacaaaaactttaaactttctctctcactatacagtatattgtcatgtgaaagtgtggaatggaagaaatgtcgatcctgttgtaactgattgtgaacacttttatgagctttaaaataaagttcatcttatggtgtcatttctaaactgttgattttg

SEQ ID NO: 2826 - DNA, 1901 bp, Artificial
  cDNA Sequence
tttaagtgtgcaatactttccccggcatttaaagttagagaattttccgtcacagatgcagttccttttccaatatctctgatctggaaccatgattcagaagatactgaaggtgttcatgaagtctttagtcgaaaccatgctgctcctttctccaaagttctcacctttctgagaagggggccttttgagctagaagctttctattctgatccccaaggagttccatatccagaagcaaaaataggccgctttgtagttcagaatgtttctgcacagaaagatggagaaaaatctagagtaaaagtcaaagtgcgagtcaacacccatggcattttcaccatctctacggcatctatggtggagaaagtcccaactgaggagaatgaaatgtcttctgaagctgacatggagtgtctgaatcagagaccaccagaaaacccagacactgataaaaatgtccagcaagacaacagtgaagctggaacacagccccaggtacaaactgatgctcaacaaacctcacagtctcccccttcacctgaacttacctcagaagaaaacaaaatcccagatgctgacaaagcaaatgaaaaaaaagttgaccagcctccagaagctaaaaagcccaaaataaaggtggtgaatgttgagctgcctattgaagccaacttggtctggcagttagggaaagaccttcttaacatgtatattgagacagagggtaagatgataatgcaagataaattggaaaaagaaaggaatgatgctaaaaatgcagttgaggaatatgtgtatgagttcagagacaagctgtgtggaccatatgaaaaatttatatgtgagcaggatcatcaaaattttttgagactcctcacagaaactgaagactggctgtatgaagaaggagaggaccaagctaaacaagcatatgttgacaagttggaagaattaatgaaaattggcactccagttaaagttcggtttcaggaagctgaagaacggccaaaaatgtttgaagaactaggacagaggctgcagcattatgccaagatagcagctgacttcagaaataaggatgagaaatacaaccatattgatgagtctgaaatgaaaaaagtggagaagtctgttaatgaagtgatggaatggatgaataatgtcatgaatgctcaggctaaaaagagtcttgatcaggatccagttgtacgtgctcaggaaattaaaacaaaaatcaaggaattgaacaacacatgtgaacccgttgtaacacaaccgaaaccaaaaattgaatcacccaaactggaaagaactccaaatggcccaaatattgataaaaaggaagaagatttagaagacaaaaacaattttggtgctgaacctccacatcagaatgattcctgtggaattgtgaattcatactaagctttctgtgcagtctcaccatttgcatcactgaggatgaaactgacttttgtcttttggagaaaaaaaactgtactgcttgttcaagagggctgtgattaaaatctttaagcatttgttcctgccaaggtagttttcttgcattttgctctccattcagcatgtgtgtgggtgtggatgtttataaacaagactaagtctgacttcataagggctttctaaaaccatttctgtccaagagaaaatgactttttgctttgatattaaaaattcaatgagtaaaacaaaagctagtcaaatgtgttagcagcatgcagaacaaaaactttaaactttctctctcactatacagtatattgtcatgtgaaagtgtggaatggaagaaatgtcgatcctgttgtaactgattgtgaacacttttatgagctttaaaataaagttcatcttatggtgtcatttctaaactgttgattttg

SEQ ID NO: 2827 - DNA, 486 bp, Artificial
  cDNA Sequence
gagaatacctctttgttttgttgtgaaaaattctgaagtacgagtgccactaatattgtcatattttgtgttaaggatcatcaaaattttttgagactcctcacagaaactgaagactggctgtatgaagaaggagaggaccaagctaaacaagcatatgttgacaagttggaagaattaatgaaaattggcactccagttaaagttcggtttcaggaagctgaagaacggccaaaaatgtttgaagaactaggacagaggctgcagcattatgccaagatagcagctgacttcagaaataaggatgagaaatacaaccatattgatgagtctgaaatgaaaaaagtggagaagtctgttaatgaagtgatggaatggatgaataatgtcatgaatgctcaggctaaaaagagtcttgatcaggatccagttgtacgtgctcaggaaattaaaacaaaaatcaaggaattgaacaacacatgtgaa

SEQ ID NO: 2828 - DNA, 951 bp, Artificial
  cDNA Sequence
attttagaaaattggcactccagttaaagttcggtttcaggaagctgaagaacggccaaaaatgtttgaagaactaggacagaggctgcagcattatgccaagatagcagctgacttcagaaataaggatgagaaatacaaccatattgatgagtctgaaatgaaaaaagtggagaagtctgttaatgaagtgatggaatggatgaataatgtcatgaatgctcaggctaaaaagagtcttgatcaggatccagttgtacgtgctcaggaaattaaaacaaaaatcaaggaattgaacaacacatgtgaacccgttgtaacacaaccgaaaccaaaaattgaatcacccaaactggaaagaactccaaatggcccaaatattgataaaaaggaagaagatttagaagacaaaaacaattttggtgctgaacctccacatcagaatgattcctgtggaattgtgaattcatactaagctttctgtgcagtctcaccatttgcatcactgaggatgaaactgacttttgtcttttggagaaaaaaaactgtactgcttgttcaagagggctgtgattaaaatctttaagcatttgttcctgccaaggtagttttcttgcattttgctctccattcagcatgtgtgtgggtgtggatgtttataaacaagactaagtctgacttcataagggctttctaaaaccatttctgtccaagagaaaatgactttttgctttgatattaaaaattcaatgagtaaaacaaaagctagtcaaatgtgttagcagcatgcagaacaaaaactttaaactttctctctcactatacagtatattgtcatgtgaaagtgtggaatggaagaaatgtcgatcctgttgtaactgattgtgaacacttttatgagctttaaaataaagttcatcttatggtgtcatttctaaactgttgattttg

SEQ ID NO: 2829 - DNA, 949 bp, Artificial
  cDNA Sequence
attttagaaaattggcactccagttaaagttcggtttcaggaagctgaagaacggccaaaaatgtttgaagaactaggacagaggctgcagcattatgccaagatagcagctgacttcagaaataaggatgagaaatacaaccatattgatgagtctgaaatgaaaaaagtggagaagtctgttaatgaagtgatggaatggatgaataatgtcatgaatgctcaggctaaaaagagtcttgatcaggatccagttgtacgtgctcaggaaattaaaacaaaaatcaaggaattgaacaacacatgtgaacccgttgtaacacaaccgaaaccaaaaattgaatcacccaaactggaaagaactccaaatggcccaaatattgataaaaaggaagaagatttagaagacaaaaacaattttggtgctgaacctccacatcagaatggtgaatgttaccctaatgagaaaaattctgttaatatggacttggactagataaccttaaattggcctattccttcaattaataaaatatttttgccatagtatgtgactctacataacatactgaaactatttatattttcttttttaaggatatttagaaattttgtgtattatatggaaaaagaaaaaaagcttaagtctgtagtctttatgatcctaaaagggaaaattgccttggtaactttcagattcctgtggaattgtgaattcatactaagctttctgtgcagtctcaccatttgcatcactgaggatgaaactgacttttgtcttttggagaaaaaaaactgtactgcttgttcaagagggctgtgattaaaatctttaagcatttgttcctgccaaggtagttttcttgcattttgctctccattcagcatgtgtgtgggtgtggatgtttataaacaagactaagtctgacttcataagggctttctaaaa

SEQ ID NO: 2830 - DNA, 652 bp, Artificial
  cDNA Sequence
aggaattgaacaacacatgtgaacccgttgtaacacaaccgaaaccaaaaattgaatcacccaaactggaaagaactccaaatggcccaaatattgataaaaaggaagaagatttagaagacaaaaacaattttggtgctgaacctccacatcagaatgattcctgtggaattgtgaattcatactaagctttctgtgcagtctcaccatttgcatcactgaggatgaaactgacttttgtcttttggagaaaaaaaactgtactgcttgttcaagagggctgtgattaaaatctttaagcatttgttcctgccaaggtagttttcttgcattttgctctccattcagcatgtgtgtgggtgtggatgtttataaacaagactaagtctgacttcataagggctttctaaaaccatttctgtccaagagaaaatgactttttgctttgatattaaaaattcaatgagtaaaacaaaagctagtcaaatgtgttagcagcatgcagaacaaaaactttaaactttctctctcactatacagtatattgtcatgtgaaagtgtggaatggaagaaatgtcgatcctgttgtaactgattgtgaacacttttatgagctttaaaataaagttcatcttatggtgtcatttctaaa

SEQ ID NO: 2831 - DNA, 1901 bp, Artificial; identical to SEQ ID NO: 2826
  cDNA Sequence

SEQ ID NO: 2832 - DNA, 1901 bp, Artificial; identical to SEQ ID NO: 2826
  cDNA Sequence

SEQ ID NO: 2833 - DNA, 1901 bp, Artificial; identical to SEQ ID NO: 2826
  cDNA Sequence

SEQ ID NO: 2834 - DNA, 1899 bp, Artificial
  cDNA Sequence
tttaagtgtgcaatactttccccggcatttaaagttagagaattttccgtcacagatgcagttccttttccaatatctctgatctggaaccatgattcagaagatactgaaggtgttcatgaagtctttagtcgaaaccatgctgctcctttctccaaagttctcacctttctgagaagggggccttttgagctagaagctttctattctgatccccaaggagttccatatccagaagcaaaaataggccgctttgtagttcagaatgtttctgcacagaaagatggagaaaaatctagagtaaaagtcaaagtgcgagtcaacacccatggcattttcaccatctctacggcatctatggtggagaaagtcccaactgaggagaatgaaatgtcttctgaagctgacatggagtgtctgaatcagagaccaccagaaaacccagacactgataaaaatgtccagcaagacaacagtgaagctggaacacagccccaggtacaaactgatgctcaacaaacctcacagtctcccccttcacctgaacttacctcagaagaaaacaaaatcccagatgctgacaaagcaaatgaaaaaaaagttgaccagcctccagaagctaaaaagcccaaaataaaggtggtgaatgttgagctgcctattgaagccaacttggtctggcagttagggaaagaccttcttaacatgtatattgagacagagggtaagatgataatgcaagataaattggaaaaagaaaggaatgatgctaaaaatgcagttgaggaatatgtgtatgagttcagagacaagctgtgtggaccatatgaaaaatttatatgtgagcaggatcatcaaaattttttgagactcctcacagaaactgaagactggctgtatgaagaaggagaggaccaagctaaacaagcatatgttgacaagttggaagaattaatgaaaattggcactccagttaaagttcggtttcaggaagctgaagaacggccaaaaatgtttgaagaactaggacagaggctgcagcattatgccaagatagcagctgacttcagaaataaggatgagaaatacaaccatattgatgagtctgaaatgaaaaaagtggagaagtctgttaatgaagtgatggaatggatgaataatgtcatgaatgctcaggctaaaaagagtcttgatcaggatccagttgtacgtgctcaggaaattaaaacaaaaatcaaggaattgaacaacacatgtgaacccgttgtaacacaaccgaaaccaaaaattgaatcacccaaactggaaagaactccaaatggcccaaatattgataaaaaggaagaagatttagaagacaaaaacaattttggtgctgaacctccacatcagaatggtgaatgttaccctaatgagaaaaattctgttaatatggacttggactagataaccttaaattggcctattccttcaattaataaaatatttttgccatagtatgtgactctacataacatactgaaactatttatattttcttttttaaggatatttagaaattttgtgtattatatggaaaaagaaaaaaagcttaagtctgtagtctttatgatcctaaaagggaaaattgccttggtaactttcagattcctgtggaattgtgaattcatactaagctttctgtgcagtctcaccatttgcatcactgaggatgaaactgacttttgtcttttggagaaaaaaaactgtactgcttgttcaagagggctgtgattaaaatctttaagcatttgttcctgccaaggtagttttcttgcattttgctctccattcagcatgtgtgtgggtgtggatgtttataaacaagactaagtctgacttcataagggctttctaaaa

SEQ ID NO: 2835 - DNA, 1899 bp, Artificial; identical to SEQ ID NO: 2834
  cDNA Sequence

SEQ ID NO: 2836 - DNA, 1365 bp, Artificial
  cDNA Sequence
tttaagtgtgcaatactttccccggcatttaaagttagagaattttccgtcacagatgcagttccttttccaatatctctgatctggaaccatgattcagaagatactgaaggtgttcatgaagtctttagtcgaaaccatgctgctcctttctccaaagttctcacctttctgagaagggggccttttgagctagaagctttctattctgatccccaaggagttccatatccagaagcaaaaataggccgctttgtagttcagaatgtttctgcacagaaagatggagaaaaatctagagtaaaagtcaaagtgcgagtcaacacccatggcattttcaccatctctacggcatctatggtggagaaagtcccaactgaggagaatgaaatgtcttctgaagctgacatggagtgtctgaatcagagaccaccagaaaacccagacactgataaaaatgtccagcaagacaacagtgaagctggaacacagccccaggtacaaactgatgctcaacaaacctcacagtctcccccttcacctgaacttacctcagaagaaaacaaaatcccagatgctgacaaagcaaatgaaaaaaaagttgaccagcctccagaagctaaaaagcccaaaataaaggtggtgaatgttgagctgcctattgaagccaacttggtctggcagttagggaaagaccttcttaacatgtatattgagacagagggtaagatgataatgcaagataaattggaaaaagaaaggaatgatgctaaaaatgcagttgaggaatatgtgtatgagttcagagacaagctgtgtggaccatatgaaaaatttatatgtgagcaggatcatcaaaattttttgagactcctcacagaaactgaagactggctgtatgaagaaggagaggaccaagctaaacaagcatatgttgacaagttggaagaattaatgaaaattggcactccagttaaagttcggtttcaggaagctgaagaacggccaaaaatgtttgaagaactaggacagaggctgcagcattatgccaagatagcagctgacttcagaaataaggatgagaaatacaaccatattgatgagtctgaaatgaaaaaagtggagaagtctgttaatgaagtgatggaatggatgaataatgtcatgaatgctcaggctaaaaagagtcttgatcaggatccagttgtacgtgctcaggaaattaaaacaaaaatcaaggtgagtgttactgtctcgtgtttactgctgggttcacttacggactcaagttgcaatcatttgaaccttcaacatagccatttttcctgtaaatcttttacctcatcctaactgaaaccagctttt

SEQ ID NO: 2837 - DNA, 1082 bp, Artificial
  cDNA Sequence
tttaagtgtgcaatactttccccggcatttaaagttagagaattttccgtcacagatgcagttccttttccaatatctctgatctggaaccatgattcagaagatactgaaggtgttcatgaagtctttagtcgaaaccatgctgctcctttctccaaagttctcacctttctgagaagggggccttttgagctagaagctttctattctgatccccaaggagttccatatccagaagcaaaaataggccgctttgtagttcagaatgtttctgcacagaaagatggagaaaaatctagagtaaaagtcaaagtgcgagtcaacacccatggcattttcaccatctctacggcatctatggtggagaaagtcccaactgaggagaatgaaatgtcttctgaagctgacatggagtgtctgaatcagagaccaccagaaaacccagacactgataaaaatgtccagcaagacaacagtgaagctggaacacagccccaggtacaaactgatgctcaacaaacctcacagtctcccccttcacctgaacttacctcagaagaaaacaaaatcccagatgctgacaaagcaaatgaaaaaaaagttgaccagcctccagaagctaaaaagcccaaaataaaggtggtgaatgttgagctgcctattgaagccaacttggtctggcagttagggaaagaccttcttaacatgtatattgagacagagggtaagatgataatgcaagataaattggaaaaagaaaggaatgatgctaaaaatgcagttgaggaatatgtgtatgagttcagagacaagctgtgtggaccatatgaaaaatttatatgtgagcaggatcatcaaaattttttgagactcctcacagaaactgaagactggctgtatgaagaaggagaggaccaagctaaacaagcatatgttgacaagttggaagaattaatgaaaattggcactccagttaaagttcggtttcaggaagctgaagaacggccaaaaatgtttgaagaactaggacagaggctgcagcattatgccaagatagcagctgacttcagaaataaggtgag

SEQ ID NO: 2838 - DNA, 450 bp, Artificial
  cDNA Sequence
tggtaatttgacatactaggtggttagtaactactgactgtctccaggttacaacacagttattacccacttgggtgaaaagagaagacaggaaatacattttggagttggctggcaacctgtttacaaagcaatttacaacagttccttattcttaaggggctattctaatacaagacctcagagaaacagtgcagtgtgacaaaggaggaatttatcaaaggagacagaaaaagcatcaaggcaagctgtgaaatggtgcggtaggaaccaaatagagagccaaaggatctttctgtcactgcaggcccttaggggtaagcaaatccttccctgatccctggtctccttatctgtaaatgagaataccagcacccacctcactgtgctgtaaacatgatgagttctaacaataatttataaattgtaaaatcacacaaatctaagata

SEQ ID NO: 2839 - DNA, 519 bp, Artificial
  cDNA Sequence
ctttcgcctcccggttctcaccctcatacagaccctcctttcagacccgccctcctgttcacagggacccatttcggagccctggctcacgctgggcgggaactgccgtgacgaattccccccaaggtgttgattatccatcccaacccagcctctggcttccctcccacctccaccccagctcccacaggcccctcgccccgttcatcggctgggcgctcgagacggcgcccccagatctcccaccgggcagtgtccccagctgcagctgaggagagaagcgccggcgtgcgcggtgccacgtcggaattggctctggggacgccgcagctgccgaagcgcagcgcgcggtccccacgcacgccctgcctccgggcggccggcgggctggcccggcgaggagaggagggatgcgcgccctcctcccgctcctatctgcgggtgccaccgcctgcgtcagggacccctggcccgatctttctgcccccgataacagaaaatctctttttcgtcttaaaa

SEQ ID NO: 2840 - DNA, 416 bp, Artificial
  cDNA Sequence
agaagataatcaatgaccctccaagacttgagaggagtgacctgagtttaggagatagtagaacccacctagatcatggtcgtgccagcaaatccgtgtgaatgccactggattaaaagaaggaagtttagttgaatggttactaccctcattcacaggagcagttatcggcacttccactgaggcaatggcagtgggaaaaggaaggcaaatatttattcacccatccataaactcataaaaattgccaactttacagagaaactgttttttccgtttttgaagaaagcctagcttgtctacctgggagctcttattcaagccttcacttaagctcttgaatcctccaacgaagtgctgctcaaaccttcttgtcccgaattacactgtgttcttggatacacttgcatcccaca

SEQ ID NO: 2841 - DNA, 992 bp, Artificial
  cDNA Sequence
tttttttaagaattagactgaagtgcaacggaaacataaagagaatattagtgaaattattttttaaagtggggaagaatcaaacatttaagactcccctatcctttttaaatgttgtttttaaatttcttattttttttggccggtcgtctcaaattcatctgatctcttattacctcaattttggaaactgcccgccaccgaccctccgggaccacacagacaggctgaggacgactttatgaccaagagctgaacaagatgcattgtgagaggtttctatgtatcctgagaataattggaaccacactctttggagtctctctcctccttggaatcacagctgcttatattgttggctaccagtttatccaaacggataattactatttctcttttggactgtatggtgcctttttggcatcacacctcatcatccaaagcctgtttgcctttttggagcaccgaaaaatgaaaaaatccctagaaacccccataaagttgaacaaaacagttgccctttgcatcgctgcctatcaagaagatccagactacttaaggaaatgtttgcaatctgtgaaaaggctaacctaccctgggattaaagttgtcatggtcatagatgggaactcagaagatgacctttacatgatggacatcttcagtgaagtcatgggcagagacaaatcagccacttatatctggaagaacaacttccacgaaaagggtcccggtgagacagatgagtcacataaagaaagctcgcaacacgtaacgcaattggtcttgtccaacaaaagtatctgcatcatgcaaaaatggggtggaaaaagagaagtcatgtacacagccttcagagcactgggacgaagtgtggattatgtacaggtttgtgattcagacactatgcttgacccagcctcatctgtggagatggtaaaagttttagaagaagatcccatggttggaggtgttgggggagatgtccaggt

SEQ ID NO: 2842 - DNA, 489 bp, Artificial
  cDNA Sequence
aaaggataggagagactacttttgccttgaggggaagaaagaagtcaggggctggctaacagggggtgtggaagcctgcaaactacacttcataggctgtgatcagctgccttctggttgggctctgccagtgaaaagccttgggacaggactcaaatgctggagggaaggagaagtttgattttgcattgttttggttttgttttacccctgctttcacaaatgcctccccgagtggtgacacatcagcggaagtgcaacttctggccccctgcacagcttcagggaccatctgatagcagtaacagcaactgcacctccagaagatcagaagcacatgcaggctgggcttctgtcaaaggctgggaagagctccctggcctctgagtttctcccttctcccttttactcttctacctcttccaaaagattgtaaccaactccctgtattaaatccctctctgctggaaatacctccagtgcaatcta

SEQ ID NO: 2843 - DNA, 433 bp, Artificial
  cDNA Sequence
ttcacctagcccatggccaagtcagggtctctgaagaacccccacgaaaagtgccaactggaagagccaacatttggatcttaccatttggaaggctttcaacagtcaagagagcatcacagccagcatctgcctccatctctcatccctccacagctattatattggaaaatccatcagcagttaggtcacataggagagtgatcagcatatcttgggagcacagtagacacaggttaaggagatcccctgcctgcagtgtcccaatcaaatcataggaacactgtgagactctggggtgagcttgcatttgcagacaggaactgaagggctggagaggttacactcacccaggtgcagttgcccagcatgtgaaagaggagacattctaaaccctgcacttaaaaaataaataaataaataaagttacaga

SEQ ID NO: 2844 - DNA, 766 bp, Artificial
  cDNA Sequence
cggccgccgcgcggggtcgtgcttaatattcaatgatctcgctcgcgcctccccctcctcttctcgcagaaattccaccgagtccgttactgggctcagacttttaagttaatttactgcccccctaccttggccagtaaccagcgcctttagggctagcctcccccccagctcctgcctgaaaaatgacatttcgccggtgtctccggagggggctgaatttcactttgtaactttctgcggaacccgagcccgggtggcagctcgggtggtggtatcgtatgcaaatacgcatgctgacgttacagatcatgtgggttttggcgtagattccccactgatcgaggcattttttttccctttttttttcctttttttttttcttttaaaaattttggccatcgttctccgtacgggggctttttctgtctgtctgtctggctggcaggctggctttccccctctttcccacggagcccgagccgggcgcccggtggggagtggggagtgggtggggggagccagcagagttccattttggaacgcccgtgccgcgtctccgcgttcccagcccgggtccccgcgttcacagccccagcgcaggtctggatgtaccgactgcttttggaataaaaagattcccaggatgtgagcaacacgggaccgatatgatgcttcctggtgtgtttagtggttggtgccattccaattttctgtgctgaaatcattctgaaaactcaaacagtagacttcagcacacaaggaa

SEQ ID NO: 2845 - DNA, 467 bp, Artificial
  cDNA Sequence
agcctcctgccaaaaggtttcttagtgtgtttttatgtctccctgacatggaagcagcagggatgtttccccagcccctaaaacctctgcacattgtgctcacccagcagagggtgatgattcaggaggagtcagaaataaagaaaggaaggagtgtgcagccctcgccatggaaagccacacagccccctgcatggacgggaactagagttctgctgggcgctgggatgggatacaatggaggtgcctaggggcttgttgggggctgggccagctccgtgggcatctgtgcctcctctgtgagcaggctaagctatagtaagggcttatctcctttgttttaacagttggggctttggcttccatagcaatgatttgcaaatagggtaatttattggcttctctcctcctgccttgataaatctcatatcttacatcctttggagcctcatttgaaatcaaacact

SEQ ID NO: 2846 - DNA, 2240 bp, Artificial
  cDNA Sequence
tcccgacacggtcgcacgtatcatgcgtacccagactttgccccccagaagttcaaagagaaaacacagggtcaggttaaaatcttggaagacagctttttgaaaagttcttttcctacccaagcagaactggatcggctaagggtggagaccaagctgagcaggagagagatcgactcctggttctcggagaggcggaagcttcgagacagcatggaacaagctgtcttggattccatggggtctggcaaaaaaggccaagatgtgggagcccccaatggtgctctgtctcgactcgaccagctctccggtgcccagttaacaagttctctgcccagcccttcgccagcaattgcaaaaagtcaagaacaggttcatctcctgaggagcacgtttgcaagaacccagtggcctactccccaggagtacgaccagttagcggccaagactggcctggtccgaactgagattgtgcgttggttcaaggagaacagatgcttgctgaaaacgggaaccgtgaagtggatggagcagtaccagcaccagcccatggcagatgatcacggctacgatgccgtagcaaggaaagcaacaaaacccatggccgagagcccaaagaacgggggtgatgtggttccacaatattacaaggaccccaaaaagctctgcgaagaggacttggagaagttggtgaccagggtaaaagtaggcagcgagccagcaaaagactgtttgccagcaaagccctcagaggccacctcagaccggtcagagggcagcagccgggacggccagggtagcgacgagaacgaggagtcgagcgttgtggattacgtggaggtgacggtcggggaggaggatgcgatctcagatagatcagatagctggagtcaggctgcggcagaaggtgtgtcggaactggctgaatcagactccgactgcgtccctgcagaggctggccaggcctagacagggaagtctgttagaactgctgtgctgatcaacgggacgctccgtctttgaagaaagaagagatggtctctccccagccatgggccacccttgccagtgactccaagtggaactacttagctcgcgtgtgcctggagggtgcgggaagtccagcgactctcagacgcacctcccagaggaccggtgggaattgttcatagtgccaaagtcctactactgcgttttcaatgggtccttgtacatagtttgctcctctgccctagccctcacctcttgctatactggaaccgatttgtacaatgtgggaattttgttacctttttaatcaagggcaacttccttttccagcactaccattgtaaggtttttttcaggagggagggctaaccaccttgcttttctcttttctctttttcttttttttatttttgttttattaatttggggaaaggggtgttagcattagtgccatgatatctactggattttaagtagggagactttatttttaaaggtaggttgaaatttgggagatttctcggcaggaagggctgaaatccaggcccctgtctcaacttggagagaggtgacagacggcagatcttccaaatcaaattcctttccagttcttcccctggctgcctttttgggggtccctgccttagccccacacaaggctttctgaactgccaagaggggatctggcttctcaactgctcggcctcttgggccaggctgtgcccagccagccctgggagaactgggtagcaggtggctgacttctttaagcacctttctaaataccagcagaagaggctcccgcctctgttagcatgatcagtactattgtgacattaaaacaacaacaataagatcttcctatctggagggtacagaggtgaatggctttggttttcatttctcttcttcactgccttttctcggtgtggtatttgacaagattttagctcaaagcctcaccatgaattgattttttttgtttgtgtgtgtgtttgttttgggacaattttagatacctgagtgcactttttcagttagtcctaacttttaaaagaaggaaaaccaagagacatatctggtgtacgtgttgcagtatgaactctggttgcaatccctccccgtcccacactgccccccatttgagtacaccgcacaagtcaaacgctaggaagtttgaataaaaccaatttttctaacttgttgctcatttgttgtaactcaataaagcaaagactaaacatttttat

SEQ ID NO: 2847 - DNA, 1354 bp, Artificial
  cDNA Sequence
aaaatcggcgcttaccctttaagcggcgggacttctggtcacgtcgtccgcggtcgccggaaggggaagtttcgcctcagaaggctgcctcgctggtccgaattcggtggcgccacgtccgcccgtctccgccttctgcatcgcggcttcggcggcttccacctagacacctaacagtcgcggagccggccgcgtcgtgagggggtcggcacggggagtcgggcggtcttgtgcatcttggctacctgtgggtcgaagatgtcggacatcggagactggttcaggagcatcccggcgatcacgcgctattggttcgccgccaccgtcgccgtgcccttggtcggcaaactcggcctcatcagcccggcctacctcttcctctggcccgaagccttcctttatcgctttcagatttggaggccaatcactgccaccttttatttccctgtgggtccaggaactggatttctttatttggtcaatttatatttcttatatcagtattctacgcgacttgaaacaggagcttttgatgggaggccagcagactatttattcatgctcctctttaactggatttgcatcgtgattactggcttagcaatggatatgcagttgctgatgattcctctgatcatgtcagtactttatgtctgggcccagctgaacagagacatgattgtatcattttggtttggaacacgatttaaggcctgctatttaccctgggttatccttggattcaactatatcatcggaggctcggtaatcaatgagcttattggaaatctggttggacatctttattttttcctaatgttcagatacccaatggacttgggaggaagaaattttctatccacacctcagtttttgtaccgctggctgcccagtaggagaggaggagtatcaggatttggtgtgccccctgctagcatgaggcgagctgctgatcagaatggcggaggcgggagacacaactggggccagggctttcgacttggagaccagtgaaggggcggcctcgggcagccgctcctctcaagccacatttcctcccagtgctgggtgcacttaacaactgcgttctggctaacactgttggacctgacccacactgaatgtagtctttcagtacgagacaaagtttcttaaatcccgaagaaaaatataagtgttccacaagtttcacgattctcattcaagtccttactgctgtgaagaacaaataccaactgtgcaaattgcaaaactgactacattttttggtgtcttctcttctcccctttccgtctgaataatgggttttagcgggtcctagtctgctggcattgagctggggctgggtcaccaa

SEQ ID NO: 2848 - DNA, 1354 bp, Artificial; identical to SEQ ID NO: 2847
  cDNA Sequence

SEQ ID NO: 2849 - DNA, 712 bp, Artificial
  cDNA Sequence
aaaatcggcgcttaccctttaagcggcgggacttctggtcacgtcgtccgcggtcgccggaaggggaagtttcgcctcagaaggctgcctcgctggtccgaattcggtggcgccacgtccgcccgtctccgccttctgcatcgcggcttcggcggcttccacctagacacctaacagtcgcggagccggccgcgtcgtgagggggtcggcacggggagtcgggcggtcttgtgcatcttggctacctgtgggtcgaagatgtcggacatcggagactggttcaggagcatcccggcgatcacgcgctattggttcgccgccaccgtcgccgtgcccttggtcggcaaactcggcctcatcagcccggcctacctcttcctctggcccgaagccttcctttatcgctttcagatttggaggccaatcactgccaccttttatttccctgtgggtccaggaactggatttctttatttggtcaatttatatttcttatatcagtattctacgcgacttgaaacaggagcttttgatgggaggccagcagactatttattcatgctcctctttaactggatttgcatcgtgattactggcttagcaatggatatgcagttgctgatgattcctctgatcatgtcagtactttatgtctgggcccagctgaacagagacatgattgtatcattttggtttggaacacgatttaagg

SEQ ID NO: 2850 - DNA, 801 bp, Artificial
  cDNA Sequence
cagatttggaggccaatcactgccaccttttatttccctgtgggtccaggaactggatttctttatttggtcaatttatatttcttatatcagtattctacgcgacttgaaacaggagcttttgatgggaggccagcagactatttattcatgctcctctttaactggatttgcatcgtgattactggcttagcaatggatatgcagttgctgatgattcctctgatcatgtcagtactttatgtctgggcccagctgaacagagacatgattgtatcattttggtttggaacacgatttaaggcctgctatttaccctgggttatccttggattcaactatatcatcggaggctcggtaatcaatgagcttattggaaatctggttggacatctttattttttcctaatgttcagatacccaatggacttgggaggaagaaattttctatccacacctcagtttttgtaagtgtttttgtcctgtctcatctaacattttactgcctgtgttcttagtgcatcctaatgagagctccatgaggagtatgatttacccctatgccccatctgctggagaaacctgaggcaacaagtgacttaccctagtcacacagtcacaggaagttagggattaaagcttaggctcagttgccttcctgttactcttttagccagggaccactgacaactagattccaacattacaggaggcatctcagctctctgagcctgctgagggacctgatgcaactccagagtgcgaaacagtaggctggtgaatgggcagagtcacaggtta

SEQ ID NO: 2851 - DNA, 539 bp, Artificial
  cDNA Sequence
aggcctgctatttaccctgggttatccttggattcaactatatcatcggaggctcggtaatcaatgagcttattggaaatctggttggacatctttattttttcctaatgttcagatacccaatggacttgggaggaagaaattttctatccacacctcagtttttgtaccgctggctgcccagtaggagaggaggagtatcaggatttggtgtgccccctgctagcatgaggcgagctgctgatcagaatggcggaggcgggagacacaactggggccagggctttcgacttggagaccagtgaaggggcggcctcgggcagccgctcctctcaagccacatttcctcccagtgctgggtgcacttaacaactgcgttctggctaacactgttggacctgacccacactgaatgtagtctttcagtacgagacaaagtttcttaaatcccgaagaaaaatataagtgttccacaagtttcacgattctcattcaagtccttactgctgtgaagaacaaataccaactgtgcaaattgc

SEQ ID NO: 2852 - DNA, 594 bp, Artificial
  cDNA Sequence
gcagggtaatcaatgagcttattggaaatctggttggacatctttattttttcctaatgttcagatacccaatggacttgggaggaagaaattttctatccacacctcagtttttgtaccgctggctgcccagtaggagaggaggagtatcaggatttggtgtgccccctgctagcatgaggcgagctgctgatcagaatggcggaggcgggagacacaactggggccagggctttcgacttggagaccagtgaaggggcggcctcgggcagccgctcctctcaagccacatttcctcccagtgctgggtgcacttaacaactgcgttctggctaacactgttggacctgacccacactgaatgtagtctttcagtacgagacaaagtttcttaaatcccgaagaaaaatataagtgttccacaagtttcacgattctcattcaagtccttactgctgtgaagaacaaataccaactgtgcaaattgcaaaactgactacattttttggtgtcttctcttctcccctttccgtctgaataatgggttttagcgggtcctagtctgctggcattgagctggggctgggtcaccaa

SEQ ID NO: 2853 - DNA, 1087 bp, Artificial
  cDNA Sequence
acagcagcaacggcagaggccagcgggcgaggtcaagatggtggctccgcgggcgggggaggcagtggagggaggaggagtcagaccttagccagccggaaacaccgaaacccagagacctcctggggagccgccgccgccgccctctcggccatcgctgcctccgccgcctgctccacctcgagggacgcgagcgggcggcggggctggccgtgagagagacaggagaggaaggagggcaggggcggagttgcccgccttagcccccgcccccggccgcggccccgggccctgccccgcgcggccctgcccggcccaccgagccctggtgtggcagcggctcatggcggccgtggggcccccgcagcagcaggtgcggatggcccatcagcaggtctgggcggcgctcgaagtggcgctccgggtgccctgcctttacatcatcgacgccatcttcaactcctacccggattccagccaaagccggttctgcatcgtgctccagatcttcctccggctctttggtgtatttgcatccagtattgttctgatcttgtcacaacgatcacttttcaagttttacacgtacagctcagcctttctgttagctgcaacttcagtgttggtgaattattatgcttctttgcacattgacttctatggtgcctacaacacgtcagcttttggaattgagctgcttcctcgaaaaggtccctcgctgtggatggcacttatcgttctacagctaacatttggaattggatacgttacactactccagattcattccatctattcacaattaattattttggatctcttggttcctgtaataggcttaatcacagagctaccattacacatcagagagactttactgtttacttcttccttgattctcacattaaatacagtgtttgtcctggcagtgaaactgaagtggttttattattccacacgatatgtttatcttttggtgaggcacatgtatcgaatttacggattacagttattgatggaggacacatggaagaggattcgtttcccagacatactacgagtcttttggctaacaagagttacagct

SEQ ID NO: 2854 - DNA, 695 bp, Artificial
  cDNA Sequence
cgctcagtcacccgcagcaggcgtgcagtttcccggctctccgcgcggccggggaaggtcagcgccgtaatggcgttcttggcgtcgggaccctacctgacccatcagcaaaaggtgttgcggctttataagcgggcgctacgccacctcgagtcgtggtgcgtccagagagacaaataccgatactttgcttgtttgatgagagcccggtttgaagaacataagaatgaaaaggatatggcgaaggccacccagctgctgaaggaggccgaggaagaattctggtaccgtcagcatccacagccatacatcttccctgactctcctgggggcacctcctatgagagatacgattgctacaaggtcccagaatggtgcttagatgactggcatccttctgagaaggcaatgtatcctgattactttgccaagagagaacagtggaagaaactgcggagggaaagctgggaacgagaggttaagcagctgcaggaggaaacgccacctggtggtcctttaactgaagctttgccccctgcccgaaaggaaggtgatttgcccccactgtggtggtatattgtgaccagaccccgggagcggcccatgtagaaagagagagacctcatctttcatgcttgcaagtgaaatatgttacagaacatgcacttgccctaataaaaaatcagtgaaatggt

SEQ ID NO: 2855 - DNA, 856 bp, Artificial
  cDNA Sequence
aaacaatcaagtgcagagtggaagagctttccatcacggaagattcatcatgagtctccggaaagcagctatggcagagcccaatgcaaagtttattgaaggtgttgtgttacagttattagaggaagatgatgttgtgatggggagttcagtacaaggataaagagactggagatatcaaggaactccatgctccactgactgttgttgcagatgggcttttctccaagttcaggaaaagcctggtctccaataaagtttctgtatcatctcattttgttggctttcttatgaagaatgcaccacagtttaaagcaaatcatgctgaacttattttagctaacccgagtccagttctcatctaccagatttcatccagtgaaactcgagtacttgttgacattagaggagaaatgccaaggaatttaagagaatacatggttgaaaaaatttacccacaaatacctgatcacctgaaagaaccattcttagaagccactgacaattctcatctgaggtccatgccagcaagcttccttcctccttcatcagtgaagaaacgaggtgttcttcttttgggagacgcatataatatgaggcatccacttactggtggaggaatgactgttgcttttaaagatataaaactatggagaaaactgctaaagggtatccctgacctttatgatgatgcagctattttcgaggccaaaaaatcattttactgggcaagaaaaacatctcattcctttgtcgtgaatatccttgctcaggctctttatgaattattttctgccacagatgattccctgcatcaactaagaaaagcctgttttctttatttcaaacttggtgg

SEQ ID NO: 2856 - DNA, 510 bp, Artificial
  cDNA Sequence
tatcacagccagaagatacctgaaattcctgcagatgttgtgggtgcccttctgttcctggaggattatgttcggtacacaaagctacccaggagggttgctgaagcacatgtgcctaatttcatttttgatgagttcagaacagtgctgtaactgtttttcctacttcttcaatggaaggattgtccttagatcttcccaccatcacaaatgaatttgaagatgaaaagaaactcagttgctcatacaactgcattttttctgtctattatgggaaacatcagacgttctgagtaagatatatctcatggcattagttaatataactgatattgtttaaatcatggtattacatgcaatttatatcagataaaagcagaacacatttttgtactgcctctcttaaatgctgaatgtaactgttatgtataaatccatttagttttatgttctaaagaactatttgtgcaactccagattttcagtaaaatagtattactagtacccaaa

SEQ ID NO: 2857 - DNA, 755 bp, Artificial
  cDNA Sequence
agatatacataacaacaaagcgcttaccctattttccaattgtaaactttctatttttgatcgctcagttgccaaaacttcaatacaacaaaaatctgggaatggtctgccgaaaaccgaccgacccggttgattggccaccacttgtcctgggactgctcactctgctgaagcagttccattcccggtacaccgagcagttcctggcgctgattggccagtttatctgctccacggtggagcagtgtacaagccagaagatacctgaaattcctgcagatgttgtgggtgcccttctgttcctggaggattatgttcggtacacaaagctacccaggagggttgctgaagcacatgtgcctaatttcatttttgatgagttcagaacagtgctgtaactgtttttcctacttcttcaatggaaggattgtccttagatcttcccaccatcacaaatgaatttgaagatgaaaagaaactcagttgctcatacaactgcattttttctgtctattatgggaaacatcagacgttctgagtaagatatatctcatggcattagttaatataactgatattgtttaaatcatggtattacatgcaatttatatcagataaaagcagaacacatttttgtactgcctctcttaaatgctgaatgtaactgttatgtataaatccatttagttttatgttctaaagaactatttgtgcaactccagattttcagtaaaatagtattactagtacccaaa

SEQ ID NO: 2858 - DNA, 976 bp, Artificial
  cDNA Sequence
tttttttctcatttacatttatctgtatctttaaaaattgctacaataatatatgttaattgagtaattcaaaagaaccagtaatgataattacaaaatttagtaaccgttttattggttttgaatccttcagacccctggaatgccctaccaatcctgtggctaattcaaaatatggcccagaattgtcattccctccaaaatatcatctgccagcgagaatatgggccccaaacattttgaccttcacagcgttggtatttaatgaatgttgctgaaggcaagtacttcatatggtgttgcaacttgttcccttgcaggaatggtctgccgaaaaccgaccgacccggttgattggccaccacttgtcctgggactgctcactctgctgaagcagttccattcccggtacaccgagcagttcctggcgctgattggccagtttatctgctccacggtggagcagtgtacaagccagaagatacctgaaattcctgcagatgttgtgggtgcccttctgttcctggaggattatgttcggtacacaaagctacccaggagggttgctgaagcacatgtgcctaatttcatttttgatgagttcagaacagtgctgtaactgtttttcctacttcttcaatggaaggattgtccttagatcttcccaccatcacaaatgaatttgaagatgaaaagaaactcagttgctcatacaactgcattttttctgtctattatgggaaacatcagacgttctgagtaagatatatctcatggcattagttaatataactgatattgtttaaatcatggtattacatgcaatttatatcagataaaagcagaacacatttttgtactgcctctcttaaatgctgaatgtaactgttatgtataaatccatttagttttatgttctaaagaactatttgtgcaactccagattttcagtaaaatagtattactagtacccaaa

SEQ ID NO: 2859 - DNA, 654 bp, Artificial
  cDNA Sequence
aaaactgtagttctcctcagcattagcactaatttatggtaacaatcatttcttttaaatgtctaacttatttaaccccttcattttaaattgcaaattaaagcatgtatttacatatttatatacaaaaaacttcaaaaacaaattaatccaaatcttggtccaagagtttccactttataagtggtatggtactatgctatatatatcctcttccaaaagtctcttaggacttggtaagttccaaatattcattcacaaatggttcccctttaagcttaatgaaccatatacttcatttctgagtaaattagaggaaatattacagaacacgctttgtacaatacagcaccactactgagaagggctcgaggttttgtaatccaaggttctgacttaaagcaaaaatacacggcatagattgcaacagcaaagaagtgtccaattaaaactagagggttaggagacaatctaaagcagcccaacaggacccgcaacacattcgccaccaagtttgaaataaagaaaacaggcttttcttatgtctacacttaccatctgtggcagaaaataattcataaagagcctgagcaaggatattcacgacaaaggaatgagatgtttttcttgcccagtaaaatgattttttggcct

SEQ ID NO: 2860 - DNA, 412 bp, Artificial
  cDNA Sequence
ggcgctctggggccgggatcggcgtcggggtcggggttggggttggttcaccgcagcagccccagctcctgcgccctccctggactgaggtgtgctcgctttgaggagaagcctggagtgatccgctgcctcgggtcggaacgtttccattcattccgctagcatttattgagcgcttatgatatgtcagtccccggagtccgaaagaggaatcagacacagcttccctgccctgtatgttacaagtcactctgcctctgtggggagaaggcaacttcttcatgaactcgaacatcctttgcaattctgtatcagatacttggcagggtttaaaaaaacatggcacctcttataacttttcacccccaatattatgttttatctgctaataaaataattatttggtaaaaca

SEQ ID NO: 2861 - DNA, 813 bp, Artificial
  cDNA Sequence
ttaattgcagaaaaatttattaaattggaaaatcttgcgtttttcaatggcgctggccccgggtcagcgggcgattttctctgcatcaagatgggctttgccgtttccgtagtgggcaccagtggtggcctgattgtcagtcttctcccggcatttttaaggccaggagccgagcgctgcttgtaggcgaataccctacagagcggtttggctttttaaattactgttattattttgggcagagaacagtcggtctggtgcaccccgtcctcgctgcagaagaggctgcgagtccgaggtgggtctctcggaaggtgaaattccttctggggtgagcgagccccggccccgcgcgcagtccagcggccccgcgtgtgtgccctcgccctgccggagccgggaaaatggaggctgtgattgagaaggaatgcagcgcgctcggaggcctcttccagaccatcatcagcgacatgaaggggagctatccagtttgggaagatttcataaacaaagcaggaaagctgcagtcccagcttcggacaacagtagtagcagcagctgccttcttggacgcctttcagaaagtggctgacatggccaccaacacacgtggtgggaccagggagattggatctgctctcaccaggatgtgcatgaggcacagaagcattgaagccaagctgaggcagttttcgagcgctttaattgattgtctgataaacccacttcaagaacagatggaagaatggaagaaagtggccaaccagctggataaagaccacgcaaaagaatataagaaagcccgccaagaga

SEQ ID NO: 2862 - DNA, 816 bp, Artificial
  cDNA Sequence
ttaattgcagaaaaatttattaaattggaaaatcttgcgtttttcaatggcgctggccccgggtcagcgggcgattttctctgcatcaagatgggctttgccgtttccgtagtgggcaccagtggtggcctgattgtcagtcttctcccggcatttttaaggccaggagccgagcgctgcttgtaggcgaataccctacagagcggtttggctttttaaattactgttattattttgggcagagaacagtcggtctggtgcaccccgtcctcgctgcagaagaggctgcgagtccgaggtgggtctctcggaaggtgaaattccttctggggtgagcgagccccggccccgcgcgcagtccagcggccccgcgtgtgtgccctcgccctgccggagccgggaaaatggaggctgtgattgagaaggaatgcagcgcgctcggaggcctcttccagaccatcatcagcgacatgaaggggagctatccagtttgggaagatttcataaacaaagcaggaaagctgcagtcccagcttcggacaacagtagtagcagcagctgccttcttggacgcctttcagaaagtggctgacatggccaccaacacacgtggtaagcagatggaggctgactcccagtgttaactgcattctgcacgtggactcttccccttgggtggctgcacaagaagatgcagcttaagttatcagagctgagctgactcgtattttcccattttttaaaactctgtgggattccacatattagaagttgcaactagttttctggataataaagcacatgtgaagaagaatg

SEQ ID NO: 2863 - DNA, 743 bp, Artificial
  cDNA Sequence
ggtgatatccagcctcagttggacagtgctctccaagatgtcaatgataagtatctcttattggaagaaacagaaaagcaggctgtccggaaggctttgattgaagaacgtggccgattctgtaccttcatctctatgctgcggccagtgattgaagaagaaatctcaatgctaggggaaataacccaccttcagaccatctcggaagatctaaaaagcctgaccatggaccctcacaaactgccctcctcaagtgaacaggtgattctggacttgaaaggttctgattacagctggtcgtatcagacgccaccctcttcccccagcaccaccatgtccagaaagtccagtgtctgcagcagcctgaacagtgtcaacagcagtgactcccggtccagcggctcccactcgcattcccccagctcacattaccgctaccgcagctccaacctggcccagcaggctcctgtgaggctgtccagcgtgtcctcccatgactcaggattcatatcccaggatgccttccagtccaagtcaccatcccccatgccgccagaggcccccaaccagttgtctaacgggttttctcactatagtttatcaagtgagtcccacgtggggcccacgggtgcaggccttttccctcattgcctgcctgcctcccgcctgctccctcgggtcacctctgtccaccttccagactacgctcattattacaccattgggcccggcatgttcccgtc

SEQ ID NO: 2864 - DNA, 243 bp, Artificial
  cDNA Sequence
ccagttgtctaacgggttttctcactatagtttatcaagtgagtcccacgtggggcccacgggtgcaggccttttccctcattgcctgcctgcctcccgcctgctccctcgggtcacctctgtccaccttccagactacgctcattattacaccattgggcccggcatgttcccgtcatctcagatccctagctggaaggactgggctaagcctgggccctatgaccagcctctggtgaacac

SEQ ID NO: 2865 - DNA, 675 bp, Artificial
  cDNA Sequence
gcggctacagcacccagacaaccaccccctgctgctctgaggacaccatcccttcccaagtttcagattatgattatttctctgtaagtggtgaccaggaggcagatcagcaggagttcgacaagtcctccaccattccaagaaacagcgacatcagccagtcctaccgacggatgttccaagccaagcgtccagcctcaactgctggcctccccaccaccctgggacctgctatggtcactccaggggttgcaactatccgacggaccccttccaccaagccttctgtccgccggggaaccattggagctggtcccatccccatcaagacacccgtgatccctgtcaagaccccaaccgtcccagacctcccaggggtgttgccagcccctccagatgggccagaagagcggggggagcacagccctgagtcgccatctgtgggtgagggcccccaaggtgtcaccagcatgccctcctcaatgtggagcggccaagcttccgttaaccctccacttccaggcccgaagcccagtatccctgaggagcacagacaggcaattccagaaagtgaagctgaagaccaggaacgggaacccccaagtgccactgtctccccaggccagattccagagagtgaccctgcagacctgagcccaagggatactccacaag

SEQ ID NO: 2866 - DNA, 1018 bp, Artificial
  cDNA Sequence
acttccgcttccgctggggaggtcctccatgcgcagtcatgagtcgcttcaagtttatcgatattggtatcaacttgactgaccctatgttcagaggaatttataggggggttcaaaagcatcaagatgacttacaggatgtaatagggagagctgtcgagattggtgttaaaaagtttatgattacaggtggaaatctacaagacagtaaagatgcactgcatttggcacaaacaaatggtatgtttttcagtacagttggatgtcatcctacaagatgtggtgaatttgaaaagaataaccctgatctttacttaaaggagttgctaaatcttgctgaaaacaataaagggaaagttgtggcaataggagaatgcggacttgattttgaccgactgcagttttgtcccaaagatactcaactcaaatattttgaaaaacagtttgaactgtcagaacaaacaaaattaccaatgtttcttcattgtcgaaactcacatgctgaatttttggacataatgaaaagaaatagagatcggtgtgtagggggagtggtgcattcatttgatggtaccaaggaagcagcagctgctttgattgacttggatctttatataggatttaatggttgctcactgaaaactgaagctaatttggaagttttgaagtcaattcctagtgaaaaattaatgattgagacagatgcaccttggtgtggagtcaaaagtacacatgctggatcaaaatatataagaactgcatttcctaccaaaaagaagtgggaaagtgggcactgcttaaaagacagaaatgaaccctgccatataattcaaatattggagataatgtcagcagtgagagatgaggatccactggaattagccaatacactatataacaatactattaaagtattttttcctggaatataattggtatatgtcttccactttccatcatgtatgtaaaatttcatagtaaaacttcctgatagtttcaataaagaaattatctgcaa

SEQ ID NO: 2867 - DNA, 664 bp, Artificial
  cDNA Sequence
acttccgcttccgctggggaggtcctccatgcgcagtcatgagtcgcttcaagtttatcgatattggtatcaacttgactgaccctatgttcagaggaatttataggggggttcaaaagcatcaagatgacttacaggatgtaatagggagagctgtcgagattggtgttaaaaagtttatgattacaggtggaaatctacaagacagtaaagatgcactgcatttggcacaaacaaatggtatgtttttcagtacagttggatgtcatcctacaagatgtggtgaatttgaaaagaataaccctgatctttacttaaaggagttgctaaatcttgctgaaaacaataaagggaaagttgtggcaataggagaatgcggacttgattttgaccgactgcagttttgtcccaaagatactcaactcaaatattttgaaaaacagtttgaactgtcagaacaaacaaaattaccaatgtttcttcattgtcgaaactcacatgctgaatttttggacataatgaaaagaaatagagatcggtgtgtagggggagtggtgcattcatttgatggtaccaaggaagcagcagctgctttgattgacttggatctttatataggatttaatggttgcattatgtatacatatacacgtcatatctgact

SEQ ID NO: 2868 - DNA, 632 bp, Artificial
  cDNA Sequence
acttccgcttccgctggggaggtcctccatgcgcagtcatgagtcgcttcaagtttatcgatattggtatcaacttgactgaccctatgttcagaggaatttataggggggttcaaaagcatcaagatgacttacaggatgtaatagggagagctgtcgagattggtgttaaaaagtttatgattacaggtggaaatctacaagacagtaaagatgcactgcatttggcacaaacaaatggtatgtttttcagtacagttggatgtcatcctacaagatgtggtgaatttgaaaagaataaccctgatctttacttaaaggagttgctaaatcttgctgaaaacaataaagggaaagttgtggcaataggagaatgcggacttgattttgaccgactgcagttttgtcccaaagatactcaactcaaatattttgaaaaacagtttgaactgtcagaacaaacaaaattaccaatgtttcttcattgtcgaaactcacatgctgaatttttggacataatgaaaagaaatagagatcggtgtgtagggggagtggtgcattcatttgatggtaccaaggaagcagcagctgctttgattgacttggatctttatataggatttaatggttgg

SEQ ID NO: 2869 - DNA, 1016 bp, Artificial
  cDNA Sequence
cgcttccgctggggaggtcctccatgcgcagtcatgagtcgcttcaagtttatcgatattggtatcaacttgactgaccctatgttcagaggaatttataggggggttcaaaagcatcaagatgacttacaggatgtaatagggagagctgtcgagattggtgttaaaaagtttatgattacaggtggaaatctacaagacagtaaagatgcactgcatttggcacaaacaaatggtatcctcatatttcttttaccaaaaaaaaaatgaattaagtaattttgaagaagtctttctgaaaactgcttcaggtatgtttttcagtacagttggatgtcatcctacaagatgtggtgaatttgaaaagaataaccctgatctttacttaaaggagttgctaaatcttgctgaaaacaataaagggaaagttgtggcaataggagaatgcggacttgattttgaccgactgcagttttgtcccaaagatactcaactcaaatattttgaaaaacagtttgaactgtcagaacaaacaaaattaccaatgtttcttcattgtcgaaactcacatgctgaatttttggacataatgaaaagaaatagagatcggtgtgtagggggagtggtaactcactgaaaactgaagctaatttggaagttttgaagtcaattcctagtgaaaaattaatgattgagacagatgcaccttggtgtggagtcaaaagtacacatgctggatcaaaatatataagaactgcatttcctaccaaaaagaagtgggaaagtgggcactgcttaaaagacagaaatgaaccctgccatataattcaaatattggagataatgtcagcagtgagagatgaggatccactggaattagccaatacactatataacaatactattaaagtattttttcctggaatataattggtatatgtcttccactttccatcatgtatgtaaaatttcatagtaaaacttcctgatagtttcaataaagaaattatctgcaa

SEQ ID NO: 2870 - DNA, 1069 bp, Artificial
  cDNA Sequence
cgcttccgctggggaggtcctccatgcgcagtcatgagtcgcttcaagtttatcgatattggtatcaacttgactgaccctatgttcagaggaatttataggggggttcaaaagcatcaagatgacttacaggatgtaatagggagagctgtcgagattggttttatgattacaggtggaaatctacaagacagtaaagatgcactgcatttggcacaaacaaatggtatcctcatatttcttttaccaaaaaaaaaatgaattaagtaattttgaagaagtctttctgaaaactgcttcaggtatgtttttcagtacagttggatgtcatcctacaagatgtggtgaatttgaaaagaataaccctgatctttacttaaaggagttgctaaatcttgctgaaaacaataaagggaaagttgtggcaataggagaatgcggacttgattttgaccgactgcagttttgtcccaaagatactcaactcaaatattttgaaaaacagtttgaactgtcagaacaaacaaaattaccaatgtttcttcattgtcgaaactcacatgctgaatttttgggtgaaaatagagatcggtgtgtagggggagtggtgcattcatttgatggtaccaaggaagcagcagctgctttgattgacttggatctttatataggatttaatggttgctcactgaaaactgaagctaatttggaagttttgaagtcaattcctagtgaaaaattaatgattgagacagatgcaccttggtgtggagtcaaaagtacacatgctggatcaaaatatataagaactgcatttcctaccaaaaagaagtgggaaagtgggcactgcttaaaagacagaaatgaaccctgccatataattcaaatattggagataatgtcagcagtgagagatgaggatccactggaattagccaatacactatataacaatactattaaagtattttttcctggaatataattggtatatgtcttccactttccatcatgtatgtaaaatttcatagtaaaacttcctgatagtttcaataaagaaattatctgc

SEQ ID NO: 2871 - DNA, 939 bp, Artificial
  cDNA Sequence
gcttccgctggggaggtcctccatgcgcagtcatgagtcgcttcaagtttatcgatattggtatcaacttgactgaccctatgttcagaggaatttataggggggttcaaaagcatcaagatgacttacaggatgtaatagggagagctgtcgagattggtgttaaaaagtttatgattacaggtggaaatctacaagacagtaaagatgcactgcatttggcacaaacaaatggtatgtttttcagtacagttggatgtcatcctacaagatgtggtgaatttgaaaagaataaccctgatctttacttaaaggagttgctaaatcttgctgaaaacaataaagggaaagttgtggcaataggagaatgcggacttgattttgaccgactgcagttttgtcccaaagatactcaactcaaatattttgaaaaacagtttgaactgtcagaacaaacaaaattaccaatgtttcttcattgtcgaaactcacatgctgaatttttggacataatgaaaagaaatagagatcggtgtgtagggggagtggtaactcactgaaaactgaagctaatttggaagttttgaagtcaattcctagtgaaaaattaatgattgagacagatgcaccttggtgtggagtcaaaagtacacatgctggatcaaaatatataagaactgcatttcctaccaaaaagaagtgggaaagtgggcactgcttaaaagacagaaatgaaccctgccatataattcaaatattggagataatgtcagcagtgagagatgaggatccactggaattagccaatacactatataacaatactattaaagtattttttcctggaatataattggtatatgtcttccactttccatcatgtatgtaaaatttcatagtaaaacttcctgatagtttcaataaagaaattatctgcaa

SEQ ID NO: 2872 - DNA, 910 bp, Artificial
  cDNA Sequence
gtcatgagtcgcttcaagtttatcgatattggtatcaacttgactgaccctatgttcagaggaatttataggggggttcaaaagcatcaagatgacttacaggatgtaatagggagagctgtcgagattggtgttaaaaagtttatgattacaggtggaaatctacaagacagtaaagatgcactgcatttggcacaaacaaatggtatgtttttcagtacagttggatgtcatcctacaagatgtggtgaatttgaaaagaataaccctgatctttacttaaaggagttgctaaatcttgctgaaaacaataaagggaaagttgtggcaataggagaatgcggacttgattttgaccgactgcagttttgtcccaaagatactcaactcaaatattttgaaaaacagtttgaactgtcagaacaaacaaaattaccaatgtttcttcattgtcgaaactcacatgctgaatttttggacataatgaaaagaaatagagatcggtgtgtagggggagtggtaactcactgaaaactgaagctaatttggaagttttgaagtcaattcctagtgaaaaattaatgattgagacagatgcaccttggtgtggagtcaaaagtacacatgctggatcaaaatatataagaactgcatttcctaccaaaaagaagtgggaaagtgggcactgcttaaaagacagaaatgaaccctgccatataattcaaatattggagataatgtcagcagtgagagatgaggatccactggaattagccaatacactatataacaatactattaaagtattttttcctggaatataattggtatatgtcttccactttccatcatgtatgtaaaatttcatagtaaaacttcctgatagtttcaataaagaaattatctgcaa

SEQ ID NO: 2873 - DNA, 629 bp, Artificial
  cDNA Sequence
gtcatgagtcgcttcaagtttatcgatattggtatcaacttgactgaccctatgttcagaggaatttataggggggttcaaaagcatcaagatgacttacaggatgtaatagggagagctgtcgagattggtgttaaaaagtttatgattacaggtggaaatctacaagacagtaaagatgcactgcatttggcacaaacaaatggtatgtttttcagtacagttggatgtcatcctacaagatgtggtgaatttgaaaagaataaccctgatctttacttaaaggagttgctaaatcttgctgaaaacaataaagggaaagttgtggcaataggagaatgcggacttgattttgaccgactgcagttttgtcccaaagatactcaactcaaatattttgaaaaacagtttgaactgtcagaacaaacaaaattaccaatgtttcttcattgtcgaaactcacatgctgaatttttggacataatgaaaagaaatagagatcggtgtgtagggggagtggtgcattcatttgatggtaccaaggaagcagcagctgctttgattgacttggatctttatataggatttaatggttgcattatgtatacatatacacgtcatatctgact

SEQ ID NO: 2874 - DNA, 962 bp, Artificial
  cDNA Sequence
gatattggtatcaacttgactgaccctatgttcagaggaatttataggggggttcaaaagcatcaagatgacttacaggatgtaatagggagagctgtcgagattggtgttaaaaagtttatgattacaggtggaaatctacaagacagtaaagatgcactgcatttggcacaaacaaatggtatcctcatatttcttttaccaaaaaaaaaatgaattaagtaattttgaagaagtctttctgaaaactgcttcaggtatgtttttcagtacagttggatgtcatcctacaagatgtggtgaatttgaaaagaataaccctgatctttacttaaaggagttgctaaatcttgctgaaaacaataaagggaaagttgtggcaataggagaatgcggacttgattttgaccgactgcagttttgtcccaaagatactcaactcaaatattttgaaaaacagtttgaactgtcagaacaaacaaaattaccaatgtttcttcattgtcgaaactcacatgctgaatttttggacataatgaaaagaaatagagatcggtgtgtagggggagtggtaactcactgaaaactgaagctaatttggaagttttgaagtcaattcctagtgaaaaattaatgattgagacagatgcaccttggtgtggagtcaaaagtacacatgctggatcaaaatatataagaactgcatttcctaccaaaaagaagtgggaaagtgggcactgcttaaaagacagaaatgaaccctgccatataattcaaatattggagataatgtcagcagtgagagatgaggatccactggaattagccaatacactatataacaatactattaaagtattttttcctggaatataattggtatatgtcttccactttccatcatgtatgtaaaatttcatagtaaaacttcctgatagtttcaataaagaaattatctgcaa

SEQ ID NO: 2875 - DNA, 448 bp, Artificial
  cDNA Sequence
ttctgtgacagtcatacatctctgcagtcaaagaaaccgaggctcaaagaaattaggaaacagctcactgaaaactgaagctaatttggaagttttgaagtcaattcctagtgaaaaattaatgattgagacagatgcaccttggtgtggagtcaaaagtacacatgctggatcaaaatatataagaactgcatttcctaccaaaaagaagtgggaaagtgggcactgcttaaaagacagaaatgaaccctgccatataattcaaatattggagataatgtcagcagtgagagatgaggatccactggaattagccaatacactatataacaatactattaaagtattttttcctggaatataattggtatatgtcttccactttccatcatgtatgtaaaatttcatagtaaaacttcctgatagtttcaataaagaaattatctgc

SEQ ID NO: 2876 - DNA, 584 bp, Artificial
  cDNA Sequence
tgaatgtacagccatttccgaaggcaaagtgcatggaaataatgattacacgctgtaactcttgttagccaaaagactcgtagtatgtctgggaaacgaatcctcttccatgtgtcctccatcaataactgtaatccgtaaattcgatacatgtgcctcaccaaaagataaacatatcgtgtggaataataaaaccacttcagtttcactgccaggacaaacactgtatttaatgtgagaatcaaggaagaagtaaacagtaaagtctctctgatgtgtaatggtagctctgtgattaagcctattacaggaaccaagagatccaaaataattaattgtgaatagatggaatgaatctggagtagtgtaacgtatccaattccaaatgttagctgtagaacgataagtgccatccacagcgagggaccttttcgaggaagcagctcaattccaaaagctgacgtgttgtaggcaccatagaagtcaatgtgcaaagaagcataataattcaccaacactgaagttgcagctaacagaaaggctgagctgtacgtgtaaaacttgaaaagtgatcgttgtgacaa

SEQ ID NO: 2877 - DNA, 359 bp, Artificial
  cDNA Sequence
agaaatcccgcgaaggccgcccgggatcctggtagaggcgacgctgtgtgcgtttatggagcgcttgcgatggacagaagtgaggacattcatcggccgcattttactaatggcaaggagatagcgactgaagggcaagaacctagggtttcctgtctttgatatttctcatctttgagcaaaaggagagaggccattatggggaaaaagatccaaaaggactcatctaaaacacaagttgggtagaggagataggtgagtactattatattatgttcatggaaaatgagttcatgggctttcctctaatttttattttaaaaataaatgtaaatattaaataaaattttttaaatgaa

SEQ ID NO: 2878 - DNA, 834 bp, Artificial
  cDNA Sequence
gtattcatccacaatgcgatacctttcatagggtttggctttttggataatgcaattatgattgttgctggaacccatattgaaatgtctattggaattattttgggaatttcaactatggcagctgctgctttgggaaatcttgtgtcagatctagctggacttggacttgcaggctacgttgaagcattggcttccaggttaggcctgtcaattcctgatctcacaccaaagcaagttgacatgtggcaaacacgtcttagtacacatttgggcaaagctgttggggtgactattggctgcattctaggaatgtttcctttaattttctttggaggaggtgaagaagatgaaaaactggaaacgaaaagttaatcctcttagaatacctataaaaagatgtaaactaatgtacctcagtaattaaatatgctgtcacaacatttaggaattaagacagtaacagtatagatatgggatcaaataatttagcatgtattatggaaaacactaacttattgtggcttgatcttcttaggacatcttttttaaaaagctgtttagtatcattttgtgtatattgttgaaatgctttttcatcaatagcagtcaacattttatcctttctttttatattcataatgttatttaagtgtcattgatgtactgtattgacttggggtttgcttatttgttacttaacatgtgtacatgcatgaaagcatttttcgttgttccctgatagttacatttcaaccttgggatttttccaaattacttaagatgtttaatgtcagttaaagatttttttaccctctttttgggaacatcaat

SEQ ID NO: 2879 - DNA, 329 bp, Artificial
  cDNA Sequence
tgttaaaagcatgcgaagctccccagctgaaccttgtattctctgactattgagcaacttcgattccactggcagtctaagttcaaccaacctcagaggagccttgggccacagagaagacctgactctacagacaattctccagtgtttccaacattggctcaacccaaaactcaacttcagcagaaatgaaggtaaaactgcaggctgctttatctgaactcagcagcaagagataacataaatggaagtaatttggaagcagaaagcaaaatgcaagtgtaaggaatatttataataaaactcaaaaatgtatcaaaacataaaca

SEQ ID NO: 2880 - DNA, 1078 bp, Artificial
  cDNA Sequence
aagaccgagaggccggacagcccagccgccgccccgggcagcggaggcgcccctggccgcgcgggcatcaaggaggaggcgcccttcagcctgctgttcctgagcagggagcggggtcccagccaaagcactcctagcctgatctccagcgccgcacccaccatgatcaaaatggaagtgaacggtcacggcaaggccatggcgctgggcgagggtcccccgctgcccgcgggcgtccaggtccccgccgggcctcagacagtgatgggcccgggcctggcgcccatgctggcccccccaccgcgccggacgcccaagcagcacaactgccagtcgtgcgggaagaccttctcctcggccagcgccctgcagatccatgagcgcacgcacaccggcgagaagccgttcggctgcaccatctgcggccgggccttcaccactaagggcaacctcaaggtgcacatggggacacacatgtggaataacgcccccgcgagacgcggccgccgcctgtctgtggagaaccccatggctctcctagggggtgatgccctgaagttctctgaaatgttccagaaggacctggcagctcgggcaatgaacgtcgaccccagtttttggaaccagtatgctgcagccatcactaacgggctcgccatgaagaacaacgagatctccgtcatccagaacggcggcatcccccagctccccgtgagtcttgggggcagcgccctcccccctctgggcagcatggccagtgggatggacaaagcacgcactggcagtagcccacccatcgtcagcttggacaaagcgagctcagaaacagcagccagccgcccattcacgcggtttatcgaggataacaaggagattggtatcaactagccagtgactcgctcatctgccctgcccaggcccacgttttgaagttggagcatcaggcctccgacctttcttgcctcggttctcattacactttcacccatagcagaaaacactttgtgcggctgccgagaggtggtcttgtaagcgctgcatggcgctcccttcaacagcaagcctgactgttctcgag

SEQ ID NO: 2881 - DNA, 424 bp, Artificial
  cDNA Sequence
tctgcggccgggccttcaccactaagggcaacctcaagaatatcagagagcctaaactatgaacattggtgttactgtcctgatttctaccaccgtctgcatctttggcctgttttcattggaagtatcatagattgtcatttggacagaccattcctagcgaatactggcctttcgcggagcttggaaaaccctgtgggaaaatcagaaagctggtaagataagaggaagaagagatgtcacggtgtcagattatgtttgtattctgttctgtccaaagttctttacatcagtaaatgaaaaacaaaacaaatgatgcataggccacgccctgcagtgaaagatgcaagaacttgttcatattggtatgaatcgttcactgtatatgattcaaacatgtggaaataaatgtttgattacagtc

SEQ ID NO: 2882 - DNA, 1135 bp, Artificial
  cDNA Sequence
cggccgcagccaaccgcaaacgcgcggcctactacagcgccgcggggcccaggccgggagccgaccggcacagcaggtaccagctggaggatgagtctgcgcatttggatgaaatgccactaatgatgtctgaagaaggctttgagaatgaggaaagtgattaccacaccttaccacgagccaggataatgcaaaggaaaagaggactggagtggtttgtctgtgatggctggaagttcctctgtaccagttgctgtggttggctgataaatatttgtcgaagaaagaaagagctgaaagctcgcacagtatggcttggatgtcctgaaaagtgtgaagaaaaacatcccaggaattctataaaaaatcaaaaatacaatgtgtttacctttatacctggggttttgtatgaacaattcaagtttttcttgaatctctattttctagtaatatcctgctcacagtttgtaccagcattgaaaataggctatctctacacctactgggctcctctggtaagaaaagactttaaaaattaagttaaattatgaaatatttagaatatagttttaagagttgagatggttaaaagttaaattgaccagatttttaaaacatggtgttgtagtgttcactgaacttctgttaaaagattttgctgagtgatttcagtccctctgagaaccatgggaagtatggtggcagcacctgcctgtagagctgccaaagttacaaagtgcctgagctggcagcagaggggttttccttggtcattctgcacctgtgttaaggttgcaggtcatcagcagctccctcctgtttgatgcagctgttgggaatgggggctggggctgtgggtctgttctgttactctcttcacaccctgaccatggtgagcattctgaagtatccaagtgcagtacgtatgatttctggttgatatctcagtgtataaagtttttcaaaaggccagtgatgcaatgatgcttatcaatgaatgtttccatttcaaatatatgctgtcttgatagtcttaagctgttggctgagagttttcattaatttttagcttgtagagacaagatgtacatcgtctttcctcctttcatagaaaaatgtacttactacttccttt

SEQ ID NO: 2883 - DNA, 557 bp, Artificial
  cDNA Sequence
gcggccgccaggatgtgcccccggccccgtcgtcgccgcgcccgcgcccctcgccccagtacgtcttttttcgtttcctaaatttcttatttttgtccttgcaagtggtcctgtctggtgtgaaccgtcagcacagatggcctcctggagcttccccgagtcgttcgctgggggaagcgggcggtgagcggccagcccgggcgctccgcaggccgcgagctcccggcagggctggtggcgggggtccgcctgggggaggaatccccgcctgctccatcggacccggcctggcgcggctcgcggcgctcggcgggctcccttccattctagaatcttcccgcttgcttcccagcccgcgttcttccgcctgcctttaattgtgtgtggacgtggggaggatcttctaagtccctccaacgaaggcaagtgtgagactctggccctttatttgtaagaagcaagccttcagattgcagaagtgtcgcgcgggtcgccgtgcgttgcgcgagtgggaagatggaggaggccggcacgctgctttcgtggacgcaagtgaa

SEQ ID NO: 2884 - DNA, 468 bp, Artificial
  cDNA Sequence
taaaacgtaaacatgtttttattttggctttccgtgtaatttacaattatgcatctatcacataataaatgacagacaatgttcgtaaaagaacccagaggcctcgtgtagcccaggcgggaaatggtagcctataaaatattgagggcggctttcaggttagtagcaatgtgaaaatgcacgtaatcgaagcgggcaccattagttaagtttcatattctattcatataaatatttcaggcttctctcttttgccatcctatgacattagacacctgcagagtagcagcatctctttaaaatcctggataaactatgacacaggcctccatggaaatgattttccctttagtgatggactcataggcattttacttaaagtatcatttctcggccggtcacttgtccgcctccctttatgggctcatgaggccgtgagcgctgtgagagcctcggtgatgacgtgct

SEQ ID NO: 2885 - DNA, 477 bp, Artificial
  cDNA Sequence
atcatctgaccatgtacaacaaatgtaatgaaaacggtaaacctgaaccaaggcaaacccaacagtttaatttaaaaacttgaagatactaagtattcccttcaactggacattcagaaacttcacgtggctacattgtatttccccccacgagttgcttcagggttgtgaaattcactggactgtggagggagccttaaacctttgtgggtgattgacgtctaaagtacctgagcttttctggttctgctgaccctcagtctcctggaccctagaagaagaatcagacccatccttcagtctcatctctagaagcccagaataaaatgaaaaaggtatgaacgagaagagagaaatcactgttgacaacacattttacctagcagtccaacattgtttatcagcataataaaatgtgccaatactcaccagcactctaaagtatgcactaataataaatagagatatagggcataa

SEQ ID NO: 2886 - DNA, 503 bp, Artificial
  cDNA Sequence
ttttggatctgagagagttggccatgcagcagcgtttcggatccgagagctggccatgcagcagccattaaggatccaagagtcggtcatgtagcagccatttcggatctgagagagtcggccatgcagcagccgtttgggatctgagagtcggccatgcagcagccgtttgggatctgagagagtcggccatgcagcagccatttgtgcatgcttcccttctcccagccccacaggagactgactctgcatcctgcctcctttcaaatgcatcctgtgccaacagtttctgaaaacggataaacaaattgacaacctcaaatgcaaagatgaaacatttctccagatcatcaggcacatggtttactcaggcccagaggagtgagctgatataaagaagctgtgccacacagtcggatggggtccgaaggaaacaatagggctgagtgatgagtattgaagaagaaatctaaagaaagaatgtcttatcagctgaccgcaaa

SEQ ID NO: 2887 - DNA, 330 bp, Artificial
  cDNA Sequence
attgaacgtgttttgttattgtttacattaataaaatataaataaagtgccaaactcagaatttgcccctcaaagtgagatgccatgtgcttatggtcttctggggaagaaatgaggtggctggtttttcatggcttgactattcccacggagcaggcatcattcttctcttgcaactgcaatattttttttctattttccttcaattctcacaagatcttctctcattaatgtctaaaccaggaaaagatgtggcagctgttggacaactcacaggcacattccgccgtaattagagccaagaagcactggagaaccatgtccaattga

SEQ ID NO: 2888 - DNA, 909 bp, Artificial
  cDNA Sequence
agaaggtcccggcgcaaagacggtgccaccaggcacggccaccggatccccgctcccgctggctcgcgcctcgggggaagctcagactcctaaactcgcactctccgtgctttgcgccgggacccctggccacccccggcgcctactatcccgccctccctccccgcgcgccccgccgctcgccgggacagccccgcgggccatggagctggcggtcgggaacctcagcgagggcaacgcgagctggccggagccccccgccccggagcccgggccgctgttcggcatcggcgtggagaacttcgtcacgctggtggtgttcggcctgatcttcgcgctgggtgtgctgggcaacagcctagtgatcaccgtgctggcgcgcagcaagccgggcaagccgcggagcaccaccaacctgttcatcctcaacctgagcatcgccgacctggcctacctgctcttctgcatccccttccaggccaccgtgtacgcgctgcccacctgggtgctgggcgccttcatctgcaagttcatccactacttcttcaccgtgtccatgctggtgagcatcttcaccctggccgcgatgtccgtggaccgctacgtggccatcgtgcactcgcggcgctcctcctccctcagggtgtcccgcaacgcgctgctgggcgtgggctgcatctgggcgctgtccattgccatggcctcgcccgtggcctaccaccagggcctcttccacccgcgcgccagcaaccagaccttctgctgggagcagtggcccgaccctcgccacaagaaggcctacgtggtgtgcaccttcgtcttcggctacctgctgccgctcctgctcatctgcttctgctatgccaaggtccttaatcacttgcataaaaagttgaagaacatgtcaaa

SEQ ID NO: 2889 - DNA, 315 bp, Artificial
  cDNA Sequence
ctgaaaaaacacagatggctaaaagggaacctgaggttatgatgctttaaataaacaaaaaaacttaagacaattgcattccagagttgccttttgcctccaaattctcacaagtttgtaagggagcagtcttttgcaccagacagtttctgggaaactcatcgaatacatgggtgggaggatgagtcgaagtggtctgcccagtgccccctgaagagccctcccctctgctgctatggagctgttcttcaccaggtccttaatcacttgcataaaaagttgaagaacatgtcaaagaagtctgaagcatccaag

SEQ ID NO: 2890 - DNA, 661 bp, Artificial
  cDNA Sequence
ggggctgggcggggtctcagctcccgacaaggctgtgaggccatcctgggcacgtggccctggactgtcccaggggaagcccctctccacttcccccaatcccttcccaagccaagcccagcagccaggagccattaggggttagaggaagactgcagaaaaggccaaaggtgcatctggtagtttgccttgcgagcccacacgggtgggtgaagaaattcactgggtactgtgctgagggcaaaaagtcaggagtttttaagttctaggaaagcggagtttatgttggttgtgccctctaaacagtaaagggtcctctggatatgtagggccgagtccacggctctgctcacacttggatactcagtctcattcctccctggccagcaggagctttctgttgggtccagttagggtctgaggcgcctgggtcccacaaactagatggccatagggacgtccggattcaacctgctccaattcagcagctgcggcgaaaataacatccagtcgtgttttctcccaggttctactctgagtgggccccactcgccaagtacacactgaagcctcaccattgtgctcccgtcaaagccctggtttcctccatgggagctggcccttcaggacctctcagctgtgctcctgtggggtctggcag

SEQ ID NO: 2891 - DNA, 1058 bp, Artificial
  cDNA Sequence
agctgctgccctgggcgcactgccttgcgggtcactgtggctgctcctgtgcttcagcgggactagaagctgccgcccacgggcagcggggaagaaatctgggcaaagccatgagccctccgaggctgagctccagtttaggggctcacctgccttgcatcgttccgagtcctgtactggactgcatcaggccgcgtctcctcaggaaaggaaaggggatgcccctgaggagactcggtgctccccacagaactccccagcgatcccagatgggagaagctgagctgcgcgggcgctgccctcactccgggggtgaaacgtggctgtgatttccacaggtgacagaaaccaggcagtgattcaactcgtatttgactttcacattctccagcaatgttcttcaatctgggaagggtagaaaattaaagaaaggtaaggagagttaaaaaatgagatcatttcaaagtagatgcagtcttgaagcccaaatgaattacgagatccagtttgaaagctgctgcagaagtgatttcagaatcgcgcggtggctccggaatggggaactgctgctgaaagaggtcggaaagggtggggactgaatttcgggtaagaggacgccagtggttctggagcacgcggccttcagccatgcctgcgttcacaagtacattatttcagactcactccaagtttacatctctaagcccatccaagccatggcagcgcgaacctctccctcccccagctcaaggcctctgggcccccaggacagaggacagaagagccagcccctcctggctcagggttgccgggaccccgtgatggctgctgtgcctctcctgaggtgccaggtgagagctgagacttctgctcccgctgcaccagctccgtttgtctccaggcgcagtgtcagtctcgttctttaagcgcttctgaggtcccatcagcacaggtctcgtcttacctggaaaggcttgttgccttgtgcctgggactttttattctgtgcttttcttctggatattaaatttcatatccacgcttgcttgtcactcaga

SEQ ID NO: 2892 - DNA, 963 bp, Artificial
  cDNA Sequence
cgctcctcccgcgcgcggcccctggagtccctgaggcgcgcggccagcccagctcgggcccgcagcaccgggagcagcccgccggccaagcgagcgcgggccggggccggggccggggcctgggggcgccgcccccgggagtctttctgcggcccctgaggagcgagggcgacggcgaggctgaccggggccgaaaccatgaaccgaagttttcacaagtctcagaccttgcgattctacgattgcagcgcagtggaagtcaagagcaagtttggggcggaattccgaaggttctctctggaccgtcataagcctgggaagtttgaagatttctacaagctggttgtgcacacccaccatatctccaacagtgatgtaactattggctatgcagatgtgcacggagacctgctgcccatcaacaatgatgacaacttctgcaaggcggtttctagtgcaaatcccctgctcagggtcttcatccagaaacgagaggaggccgagcgtggcagcctcggcgcgggctcgctgtgcaggcggaggcgggcgctgggcgcgctgcgtgatgaaggaccccggcggcgtgcacacctggacatcggcctcccgcgcgacttccgccccgtatcatccatcatcgatgtggacctggtccccgagacgcaccggcgagtgcggctgcaccggcacggctgcgagaagccgctgggcttctacatccgcgatggcgccagcgtgcgcgtgaccccgcacgggctggagaaggtgcccggcatcttcatctcgcgcatggtacccgggggcctggcggagagcaccgggctgctggctgtgaatgacgaggtcctggaggtgaacggcattgaggtggccgggaagacgctggaccaggtcacggacatgatgatcgccaacagccacaacctcatcgtcaccgtcaagcccgccaaccagcgcaacaac

SEQ ID NO: 2893 - DNA, 370 bp, Artificial
  cDNA Sequence
atgatgacaacttctgcaaggcggtttctagtgcaaatcccctgctcagggtcttcatccagaaacgagatgacggagccctgcgaccaggaacctgactcttcagctcaaatcttggtttgaaagggggacttctctgtgcccctgttgtcggcatgccatggtagagaatggatggcccacgcagctggcccctcatgagaccccagccatctcattccactgggagccacgtcaggacgaaggaggactgggaggggcgtctggctgcgtggtgtggggcctgcagtgttgtggcacacgcagcttcagccaaacatctagccctgtacctagaactaagaaataaaactataacatcagatttaaa

SEQ ID NO: 2894 - DNA, 474 bp, Artificial
  cDNA Sequence
acttttcagcggcaggcgaagggggctgaggaaaggaggtgggtctaggcaggggaaattggggtgccaccagacggagacagcttggactaccagaatcaagcactcttttggaagagggtaatctctctccaaaaactgaggacacttaccttccccatatattgagtccagctgtgtttggtggcccaggtactaatttcaagatgccaggacgttccagttcaaattcaggttcaactggtttcatctccttcagtggtgtagagtctgctctctcctccttgaaaaacttccaagcctgtatcaactctggtatggacacagcttctagtgttgctttggatcttgtggaaagtcagactgaagtgagtagtgaatatagtatggacaaggcaatggttgaatttgctacattggatcggcaactaaaccattatgtaaaggctgttcaatctacaataaatcatgtaa

SEQ ID NO: 2895 - DNA, 1066 bp, Artificial
  cDNA Sequence
ggctgaggaaaggaggtgggtctaggcaggggaaattggggtgccaccagacggagacagcttggactaccaggtactaatttcaagatgccaggacgttccagttcaaattcaggttcaactggtttcatctccttcagtggtgtagagtctgctctctcctccttgaaaaacttccaagcctgtatcaactctggtatggacacagcttctagtgttgctttggatcttgtggaaagtcagactgaagtgagtagtgaatatagtatggacaaggcaatggttgaatttgctacattggatcggcaactaaaccattatgtaaaggctgttcaatctacaataaatcatgtgaaagaagaacgtccagaaaaaataccagatttaaaattattggtagagaagaaatttttggctttacagagcaagaattctgatgcagactttcaaaataatgaaaaatttgtacagtttaaacaacagctgaaagaactaaagaagcaatgtggtcttcaagctgacagagaagctgacggaacagaaggagtggatgaagatataattgtgacccaaagtcagaccaacttcacctgccccattacaaaggaggaaatgaagaagccagtgaaaaataaagtgtgtggccacacctatgaagaggacgccattgttcgcatgattgagtccaggcaaaagcggaagaaaaaggcctattgccctcaaattggctgtagccacacggatataagaaagtcagatcttatccaggatgaagcacttagaagggcaattgagaaccataacaagaaaagacatcgtcattccgagtaggaaaagccacctgcctgcagggacaccagcagcctacctcctaccccagctgtctgttgagagcagtgctgaccccagcagttagggactggctgcatagcatacttgttgggggtaaaacttgttgcttttatgtgtgcttgaaaacatttttcaaagttacacaacagaaatgcaatcatattgtttatttttaagtgttctataatgttaaataaaactttgatcatctgca

SEQ ID NO: 2896 - DNA, 716 bp, Artificial
  cDNA Sequence
ggctgaggaaaggaggtgggtctaggcaggggaaattggggtgccaccagacggagacagcttggactaccaggtactaatttcaagatgccaggacgttccagttcaaattcaggttcaactggtttcatctccttcagtggtgtagagtctgctctctcctccttgaaaaacttccaagcctgtatcaactctggtatggacacagcttctagtgttgctttggatcttgtggaaagtcagactgaagtgagtagtgaatatagtatggacaaggcaatggttgaatttgctacattggatcggcaactaaaccattatgtaaaggctgttcaatctacaataaatcatgtgaaagaagaacgtccagaaaaaataccagatttaaaattattggtagagaagaaatttttggctttacagagcaagaattctgatgcagactttcaaaataatgaaaaatttgtacagtttaaacaacagctgaaagaactaaagaagcaatgtggtcttcaagctgacagagaagctgacggaacagaaggagtggatgaagatataattgtgacccaaagtcagaccaacttcacctgccccattacaaaggaggaaatgaagaagccagtgaaaaataaagtgtgtggccacacctatgaagaggacgccattgttcgcatgattgagtccaggcaaaagcggaagaaaaaggcctagtg

SEQ ID NO: 2897 - DNA, 824 bp, Artificial
  cDNA Sequence
ggctgaggaaaggaggtgggtctaggcaggggaaattggggtgccaccagacggagacagcttggactaccaggtactaatttcaagatgccaggacgttccagttcaaattcaggttcaactggtttcatctccttcagtggtgtagagtctgctctctcctccttgaaaaacttccaagcctgtatcaactctggtatggacacagcttctagtgttgctttggatcttgtggaaagtcagactgaagtgagtagtgaatatagtatggacaaggcaatggttgaatttgctacattggatcggcaactaaaccattatgtaaaggctgttcaatctacaataaatcatgtgaaagaagaacgtccagaaaaaataccagatttaaaattattggtagagaagaaatttttggctttacagagcaagaattctgatgcagactttcaaaataatgaaaaatttgtacagtttaaacaacagctgaaagaactaaagaagcaatgtaagtcaacatgctttgctttggttcggctttttgaaattagggaactgacttgatgaacagccccagttaactgattttataaagtttgcttatctgcttggcttgatcctcattctaagttgcgttttattgttgttgcaattctgtattttgtctaatttttggttcaaatcagcctgctcatttctgaaagccaacagtttccacaaagtgctcagaaaatttcccagcagctagttatgtgtattgtcccattgctggggagggaaattgggaaaacaaaataaaagtgaaaactattttatttaaataacaa

SEQ ID NO: 2898 - DNA, 825 bp, Artificial
  cDNA Sequence
ggcaggggaaattggggtgccaccagacggagacagcttggactaccaggcttttaagaactgtgctattgttgacttcttcacagaatcaagcactcttttggaagagggtaatctctctccaaaaactgaggacacttaccttccccatatattgagtccagctgtgtttggtggcccaggtactaatttcaagatgccaggacgttccagttcaaattcaggttcaactggtttcatctccttcagtggtgtagagtctgctctctcctccttgaaaaacttccaagcctgtatcaactctggtatggacacagcttctagtgttgctttggatcttgtggaaagtcagactgaagtgagtagtgaatatagtatggacaaggcaatggttgaatttgctacattggatcggcaactaaaccattatgtaaaggctgttcaatctacaataaatcatgtgaaagaagaacgtccagaaaaaataccagatttaaaattattggtagagaagaaatttttggctttacagagcaagaattctgatgcagactttcaaaataatgaaaaatttgtacagtttaaacaacagctgaaagaactaaagaagcaatgtggtcttcaagctgacagagaagctgacggaacagaaggagtggatgaagatataattgtgacccaaagtcagaccaacttcacctgccccattacaaaggaggaaatgaagaagccagtgaaaaataaagtgtgtggccacacctatgaagaggacgccattgttcgcatgattgagtccaggcaaaagcggaagaaaaaggcctagtg

SEQ ID NO: 2899 - DNA, 933 bp, Artificial
  cDNA Sequence
ggcaggggaaattggggtgccaccagacggagacagcttggactaccaggcttttaagaactgtgctattgttgacttcttcacagaatcaagcactcttttggaagagggtaatctctctccaaaaactgaggacacttaccttccccatatattgagtccagctgtgtttggtggcccaggtactaatttcaagatgccaggacgttccagttcaaattcaggttcaactggtttcatctccttcagtggtgtagagtctgctctctcctccttgaaaaacttccaagcctgtatcaactctggtatggacacagcttctagtgttgctttggatcttgtggaaagtcagactgaagtgagtagtgaatatagtatggacaaggcaatggttgaatttgctacattggatcggcaactaaaccattatgtaaaggctgttcaatctacaataaatcatgtgaaagaagaacgtccagaaaaaataccagatttaaaattattggtagagaagaaatttttggctttacagagcaagaattctgatgcagactttcaaaataatgaaaaatttgtacagtttaaacaacagctgaaagaactaaagaagcaatgtaagtcaacatgctttgctttggttcggctttttgaaattagggaactgacttgatgaacagccccagttaactgattttataaagtttgcttatctgcttggcttgatcctcattctaagttgcgttttattgttgttgcaattctgtattttgtctaatttttggttcaaatcagcctgctcatttctgaaagccaacagtttccacaaagtgctcagaaaatttcccagcagctagttatgtgtattgtcccattgctggggagggaaattgggaaaacaaaataaaagtgaaaactattttatttaaataacaa

SEQ ID NO: 2900 - DNA, 719 bp, Artificial
  cDNA Sequence
ttaggtgaaagaagaacgtccagaaaaaataccagatttaaaattattggtagagaagaaatttttggctttacagagcaagaattctgatgcagactttcaaaataatgaaaaatttgtacagtttaaacaacagctgaaagaactaaagaagcaatgtggtcttcaagctgacagagaagctgacggaacagaaggagtggatgaagatataattgtgacccaaagtcagaccaacttcacctgccccattacaaaggaggaaatgaagaagccagtgaaaaataaagtgtgtggccacacctatgaagaggacgccattgttcgcatgattgagtccaggcaaaagcggaagaaaaaggcctattgccctcaaattggctgtagccacacggatataagaaagtcagatcttatccaggatgaagcacttagaagggcaattgagaaccataacaagaaaagacatcgtcattccgagtaggaaaagccacctgcctgcagggacaccagcagcctacctcctaccccagctgtctgttgagagcagtgctgaccccagcagttagggactggctgcatagcatacttgttgggggtaaaacttgttgcttttatgtgtgcttgaaaacatttttcaaagttacacaacagaaatgcaatcatattgtttatttttaagtgttctataatgttaaataaaactttgatcatctgca

SEQ ID NO: 2901 - DNA, 467 bp, Artificial
  cDNA Sequence
attacaggaggaaatgaagaagccagtgaaaaataaagtgtgtggccacacctatgaagaggacgccattgttcgcatgattgagtccaggcaaaagcggaagaaaaaggcctattgccctcaaattggctgtagccacacggatataagaaagtcagatcttatccaggatgaagcacttagaagggcaattgagaaccataacaagaaaagacatcgtcattccgagtaggaaaagccacctgcctgcagggacaccagcagcctacctcctaccccagctgtctgttgagagcagtgctgaccccagcagttagggactggctgcatagcatacttgttgggggtaaaacttgttgcttttatgtgtgcttgaaaacatttttcaaagttacacaacagaaatgcaatcatattgtttatttttaagtgttctataatgttaaataaaactttgatcatctgca

SEQ ID NO: 2902 - DNA, 1185 bp, Artificial
  cDNA Sequence
acttttcagcggcaggcgaagggggctgaggaaaggaggtgggtctaggcaggggaaattggggtgccaccagacggagacagcttggactaccagaatcaagcactcttttggaagagggtaatctctctccaaaaactgaggacacttaccttccccatatattgagtccagctgtgtttggtggcccaggtactaatttcaagatgccaggacgttccagttcaaattcaggttcaactggtttcatctccttcagtggtgtagagtctgctctctcctccttgaaaaacttccaagcctgtatcaactctggtatggacacagcttctagtgttgctttggatcttgtggaaagtcagactgaagtgagtagtgaatatagtatggacaaggcaatggttgaatttgctacattggatcggcaactaaaccattatgtaaaggctgttcaatctacaataaatcatgtgaaagaagaacgtccagaaaaaataccagatttaaaattattggtagagaagaaatttttggctttacagagcaagaattctgatgcagactttcaaaataatgaaaaatttgtacagtttaaacaacagctgaaagaactaaagaagcaatgtggtcttcaagctgacagagaagctgacggaacagaaggagtggatgaagatataattgtgacccaaagtcagaccaacttcacctgccccattacaaaggaggaaatgaagaagccagtgaaaaataaagtgtgtggccacacctatgaagaggacgccattgttcgcatgattgagtccaggcaaaagcggaagaaaaaggcctattgccctcaaattggctgtagccacacggatataagaaagtcagatcttatccaggatgaagcacttagaagggcaattgagaaccataacaagaaaagacatcgtcattccgagtaggaaaagccacctgcctgcagggacaccagcagcctacctcctaccccagctgtctgttgagagcagtgctgaccccagcagttagggactggctgcatagcatacttgttgggggtaaaacttgttgcttttatgtgtgcttgaaaacatttttcaaagttacacaacagaaatgcaatcatattgtttatttttaagtgttctataatgttaaataaaactttgatcatctgca

SEQ ID NO: 2903 - DNA, 1222 bp, Artificial
  cDNA Sequence
acttttcagcggcaggcgaagggggctgaggaaaggaggtgggtctaggcaggggaaattggggtgccaccagacggagacagcttggactaccaggcttttaagaactgtgctattgttgacttcttcacagaatcaagcactcttttggaagagggtaatctctctccaaaaactgaggacacttaccttccccatatattgagtccagctgtgtttggtggcccaggtactaatttcaagatgccaggacgttccagttcaaattcaggttcaactggtttcatctccttcagtggtgtagagtctgctctctcctccttgaaaaacttccaagcctgtatcaactctggtatggacacagcttctagtgttgctttggatcttgtggaaagtcagactgaagtgagtagtgaatatagtatggacaaggcaatggttgaatttgctacattggatcggcaactaaaccattatgtaaaggctgttcaatctacaataaatcatgtgaaagaagaacgtccagaaaaaataccagatttaaaattattggtagagaagaaatttttggctttacagagcaagaattctgatgcagactttcaaaataatgaaaaatttgtacagtttaaacaacagctgaaagaactaaagaagcaatgtggtcttcaagctgacagagaagctgacggaacagaaggagtggatgaagatataattgtgacccaaagtcagaccaacttcacctgccccattacaaaggaggaaatgaagaagccagtgaaaaataaagtgtgtggccacacctatgaagaggacgccattgttcgcatgattgagtccaggcaaaagcggaagaaaaaggcctattgccctcaaattggctgtagccacacggatataagaaagtcagatcttatccaggatgaagcacttagaagggcaattgagaaccataacaagaaaagacatcgtcattccgagtaggaaaagccacctgcctgcagggacaccagcagcctacctcctaccccagctgtctgttgagagcagtgctgaccccagcagttagggactggctgcatagcatacttgttgggggtaaaacttgttgcttttatgtgtgcttgaaaacatttttcaaagttacacaacagaaatgcaatcatattgtttatttttaagtgttctataatgttaaataaaactttgatcatctgca

SEQ ID NO: 2904 - DNA, 872 bp, Artificial
  cDNA Sequence
acttttcagcggcaggcgaagggggctgaggaaaggaggtgggtctaggcaggggaaattggggtgccaccagacggagacagcttggactaccaggcttttaagaactgtgctattgttgacttcttcacagaatcaagcactcttttggaagagggtaatctctctccaaaaactgaggacacttaccttccccatatattgagtccagctgtgtttggtggcccaggtactaatttcaagatgccaggacgttccagttcaaattcaggttcaactggtttcatctccttcagtggtgtagagtctgctctctcctccttgaaaaacttccaagcctgtatcaactctggtatggacacagcttctagtgttgctttggatcttgtggaaagtcagactgaagtgagtagtgaatatagtatggacaaggcaatggttgaatttgctacattggatcggcaactaaaccattatgtaaaggctgttcaatctacaataaatcatgtgaaagaagaacgtccagaaaaaataccagatttaaaattattggtagagaagaaatttttggctttacagagcaagaattctgatgcagactttcaaaataatgaaaaatttgtacagtttaaacaacagctgaaagaactaaagaagcaatgtggtcttcaagctgacagagaagctgacggaacagaaggagtggatgaagatataattgtgacccaaagtcagaccaacttcacctgccccattacaaaggaggaaatgaagaagccagtgaaaaataaagtgtgtggccacacctatgaagaggacgccattgttcgcatgattgagtccaggcaaaagcggaagaaaaaggcctagtg

SEQ ID NO: 2905 - DNA, 835 bp, Artificial
  cDNA Sequence
acttttcagcggcaggcgaagggggctgaggaaaggaggtgggtctaggcaggggaaattggggtgccaccagacggagacagcttggactaccagaatcaagcactcttttggaagagggtaatctctctccaaaaactgaggacacttaccttccccatatattgagtccagctgtgtttggtggcccaggtactaatttcaagatgccaggacgttccagttcaaattcaggttcaactggtttcatctccttcagtggtgtagagtctgctctctcctccttgaaaaacttccaagcctgtatcaactctggtatggacacagcttctagtgttgctttggatcttgtggaaagtcagactgaagtgagtagtgaatatagtatggacaaggcaatggttgaatttgctacattggatcggcaactaaaccattatgtaaaggctgttcaatctacaataaatcatgtgaaagaagaacgtccagaaaaaataccagatttaaaattattggtagagaagaaatttttggctttacagagcaagaattctgatgcagactttcaaaataatgaaaaatttgtacagtttaaacaacagctgaaagaactaaagaagcaatgtggtcttcaagctgacagagaagctgacggaacagaaggagtggatgaagatataattgtgacccaaagtcagaccaacttcacctgccccattacaaaggaggaaatgaagaagccagtgaaaaataaagtgtgtggccacacctatgaagaggacgccattgttcgcatgattgagtccaggcaaaagcggaagaaaaaggcctagtg

SEQ ID NO: 2906 - DNA, 835 bp, Artificial; identical to SEQ ID NO: 2905
  cDNA Sequence

SEQ ID NO: 2907 - DNA, 723 bp, Artificial
  cDNA Sequence
acttttcagcggcaggcgaagggggctgaggaaaggaggtgggtctaggcaggggaaattggggtgccaccagacggagacagcttggactaccagaatcaagcactcttttggaagagggtaatctctctccaaaaactgaggacacttaccttccccatatattgagtccagctgtgtttggtggcccaggtactaatttcaagatgccaggacgttccagttcaaattcaggttcaactggtttcatctccttcagtggtgtagagtctgctctctcctccttgaaaaacttccaagcctgtatcaactctggtatggacacagcttctagtgttgctttggatcttgtggaaagtcagactgaagtgagtagtgaatatagtatggacaaggcaatggttgaatttgctacattggatcggcaactaaaccattatgtaaaggctgttcaatctacaataaatcatgtgaaagaagaacgtccagaaaaaataccagatttaaaattattggtagagaagaaatttttggctttacagagcaagaattctgatgcagactttcaaaataatgaaaaatttgtacagtttaaacaacagctgaaagaactaaagaagcaatgtggtcttcaagctgacagagaagctgacggaacagaaggagtggatgaagatataattgtgacccaaagtcagaccaacttcacctgccccattacaa

SEQ ID NO: 2908 - DNA, 943 bp, Artificial
  cDNA Sequence
acttttcagcggcaggcgaagggggctgaggaaaggaggtgggtctaggcaggggaaattggggtgccaccagacggagacagcttggactaccagaatcaagcactcttttggaagagggtaatctctctccaaaaactgaggacacttaccttccccatatattgagtccagctgtgtttggtggcccaggtactaatttcaagatgccaggacgttccagttcaaattcaggttcaactggtttcatctccttcagtggtgtagagtctgctctctcctccttgaaaaacttccaagcctgtatcaactctggtatggacacagcttctagtgttgctttggatcttgtggaaagtcagactgaagtgagtagtgaatatagtatggacaaggcaatggttgaatttgctacattggatcggcaactaaaccattatgtaaaggctgttcaatctacaataaatcatgtgaaagaagaacgtccagaaaaaataccagatttaaaattattggtagagaagaaatttttggctttacagagcaagaattctgatgcagactttcaaaataatgaaaaatttgtacagtttaaacaacagctgaaagaactaaagaagcaatgtaagtcaacatgctttgctttggttcggctttttgaaattagggaactgacttgatgaacagccccagttaactgattttataaagtttgcttatctgcttggcttgatcctcattctaagttgcgttttattgttgttgcaattctgtattttgtctaatttttggttcaaatcagcctgctcatttctgaaagccaacagtttccacaaagtgctcagaaaatttcccagcagctagttatgtgtattgtcccattgctggggagggaaattgggaaaacaaaataaaagtgaaaactattttatttaaataacaa

SEQ ID NO: 2909 - DNA, 966 bp, Artificial
  cDNA Sequence
cggccgcccccagcgaggctccgggagcccttgcctgcgggggtccggggactcgagccggcctccgcctcccggacgcacagccagcgtggtccccgcgtgcaacgcgagcgccggggagtggctcctgctttgcccctcgtgggggccgagccaagaccagtctgcaaactccatcccgccggctggaagaagtcgcggagccggcaccaaacccgcagcgtcttcccgcgcggatcccgggacttaaaaagccggggccaccccggcccaggacgggatgcgggtcggtccggtgcgctctgccatgagcggcgcctcgcagccccgcggcccggccctgctcttcccagccacccgaggcgtcccggccaaacgcctgctggacgccgacgacgcggcggctgtggcggccaagtgcccgcgcctctccgagtgctccagccccccggactacctcagcccccccggctcgccctgcagcccgcagcccccgcctgccgctccgggggccggcggaggctccgggagcgcgccggggcccagccgcatcgccgactacctgctgctgcccctagccgagcgcgagcatgtgtcccgggcgctgtgcatccacactggacgcgagctgcgctgcaaggtgtttcccattaaacactaccaggacaaaatcaggccttacatccagctgccatcgcacagcaacattactggcattgtggaagtgatccttggggaaaccaaggcctatgtcttctttgagaaggactttggggacatgcactcctatgtgcgaagccggaagaggctgcgggaagaggaagccgcccggctcttcaagcagattgtctccgccgtcgcccactgccaccagtcagccatcgtgctgggggacctgaagcttaggaagttcgtcttctccacggaggagagaacccagcttagactagaaagtctagaagacac

SEQ ID NO: 2910 - DNA, 573 bp, Artificial
  cDNA Sequence
gaaccaaagcggaggtgcaggtcatgtagttaggtgctgtgtgttggtgcaaaacaaagtcaagggctcatatgtcccagatttagtatttagagcttctgttcctgaggagtcacagccaagaacccagcttagactagaaagtctagaagacacacacataatgaagggggaagatgatgctttgtcagacaaacatggctgcccagcctacgtgagccctgagatcctcaacaccactgggacctactccggaaaggctgcggacgtttggagcctgggggtgatgctctacacccttctggttggacgataccccttccatgactcagaccccagtgcccttttctccaaaattcggcgtggacagttctgcattcctgagcacatttcccccaaagccaggtgcctcattcgcagcctcttgagacgggagccctccgagagactcactgcccccgagatcctactgcacccctggtttgagtccgtcttggaacccgggtacatcgactcagaaataggaacttcagaccagattgttccagagtaccaggaggacagtgacattag

SEQ ID NO: 2911 - DNA, 479 bp, Artificial
  cDNA Sequence
tctccttggctggggaaatcagaatacacagtggtatcccacttctaagatgcctgatctgaaggacagtaaaacaactgacctttgccagcatgtaaaacacatggtttaactagtcctccaggaacaacactgagcaatcctgacctgggactactttactcggccatctcctacttgagatgctccttgtctctctgttcaaggacaccttttctgagcctttcttgaacaagagtggaggaccgatagggcgattaaactgtccttgacacaactttaggttggtttgcctaaactactaggttctcaatctatatgaacctcctccagcattctaatttgtttgctctgtcttagacccagaatcccaccccatgtgcctaaccatagaccaatcttcctgccttaacttctctgctaccaattttgatgtagcccagtaagtttcagcatcatccctcaccaccccacagtcc

SEQ ID NO: 2912 - DNA, 254 bp, Artificial
  cDNA Sequence
cttccggcttcgcacataggagtgcatgtccccaaagtccttctcaaagaagacataggccttggtttccccaaggatcacttccacaatgccagtaatgttgctgtgcgatggcagctggatgtaaggcctgattttgtcctggtagtgtttaatgggaaacacctcgcagctcgcgtccagtgtggatgcacagcgcccgggacacatgctcgcgctcggctaggggcagcagcaggtagtcggcgatgcgg

SEQ ID NO: 2913 - DNA, 722 bp, Artificial
  cDNA Sequence
agcgcacccatgagggatggagcaaggtagagttaggaagctgaatcctaggttcctgtattagtccgttctcgtgctgctaataaagacacatccaagactgggtaatatttaaaggaaagaagtttaatggactcacagttccacgtggctggagaggccttacaatcatggaggaagacgaaggaagaaaaaaaggacgtcttacatggcggcaggcaagagagatgagaaccaagcgaaaggggcttccccttataaaaccatcagatctcatgagacttattcactaccatgagaaaagtagggaggacaccgcccccatgattcagttatctcccactggggccctctcacaacacgtgggaattatgggagctacaattcaagatgagatttgggtggggacacagccaaaccatataagttccaatgctccctggtaccagctaagactctgctgtatgtgaagacatttcgcagaattcagacggagatcatgatcaaatagcacctacacaatgaaagattccctagatgttacaacctcacaggatggcaaagttcaacaaacataaatttcaacaaaaatactagaacacaggttgaattaatataatgtaatcagaaaaatggctagaacacaataaggatccaatatgttacttattttgtataggtatttattaaaatcaacattatatacttctgtaattataaaa

SEQ ID NO: 2914 - DNA, 1150 bp, Artificial
  cDNA Sequence
atgtgaccgcctggggagtcaggggcggaagtcggggtctgacccgctccaggtccgggactgcggatagaagaggaccgccgccttgagggaggggtggaaactgggtgccggctccgcgcgcgacctccggccctgcgcgtgcgccgtggcgcggcccggctgacaggttctttaatggaggagccaatctctctgcacacctggtttcatctaataatatacagacaccagctctgaggccagttaatcatccccagtgtccaggcacagagtagtcggtccgcctcacaatgttggactttctagccgagaacaacctctgtggccaagcaatcctaaggattgtttcctgtggtaatgccatcattgctgaacttttgagactctctgagtttattcctgctgtgttcaggttaaaagacagagctgatcaacagaaatatggagatatcatatttgatttcagctattttaagggtccagaattatgggaaagcaaactggatgctaagccagagctacaggatttagatgaagaatttcgtgaaaacaacatagaaattgtgaccagattttatttagcatttcaaagtgtacataaatatattgtagacttaaacagatatctagatgatctcaatgaaggggtttatattcagcaaaccttagaaactgtgcttctcaatgaagatggaaaacaacttctatgtgaagcactgtacttatatggagttatgctactggtcattgaccaaaagattgaaggagaagtcagagagaggatgctggtttcttactaccgatacagtgctgctcgatcttctgctgattcaaatatggacgatatttgtaagctgcttcgaagtacaggttattctagccaaccaggtgccaaaagaccatccaactatcccgagagctatttccagagagtgcctatcaacgaatccttcatcagtatggtcattggtcgactgagatctgatgatatttacaaccaggtctcagcgtatcctttgccggagcatcgcagcacagccctggcaaaccaagctgccatgctgtacgtgattctctactttgagccttccatccttcacacccatcaagcaaaaatgagagagatagtggataaatactttccaga

SEQ ID NO: 2915 - DNA, 811 bp, Artificial
  cDNA Sequence
acccgctccaggtccgggactgcggatagaagaggaccgccgccttgagggaggggtggaaactgggtgccggctccgcgcgcgacctccggccctgcgcgtgcgccgtggcgcggcccggctgacaggttctttaatggaggagccaatctctctgcacacctggtttcatctaataatatacagacaccagctctgaggccagttaatcatccccagtgtccaggcacagagtagtcggtccgcctcacaatgttggactttctagccgagaacaacctctgtggccaagcaatcctaaggattgtttcctgtggtaatgccatcattgctgaacttttgagactctctgagtttattcctgctgtgttcaggttaaaagacagagctgatcaacagaaatatggagatatcatatttgatttcagctattttaagggtccagaattatgggaaagcaaactggatgctaagccagagctacaggatttagatgaagaatttcgtgaaaacaacatagaaattgtgaccagattttatttagcatttcaaagtgtacataaatatattgtagacttaaacaggtattgatctatttaggaatagcttattctggtagtaaatagtggagagggaaaaggacacatagcaacgtgtaaatctctctgagttactacaaaatttcctaatttagtttatactgtatatagttgtcttttcctacctgtggcactggtcatcttaagaattttgaagttttactataatgtcctgctcttatgaggtgttgtaataaacttagtttaactaa

SEQ ID NO: 2916 - DNA, 319 bp, Artificial
  cDNA Sequence
gcttgggaaccttacaaagctgcaaaaactgctttaaataataccctggacctttcaaatgtcagagaacaggcaagcagatatgctactgtcagtgaaagagtgcatgctcaagtgcagcaatttctaaaagaaggttatttaagggaggagatggttctggacaatatcccaaagcttctgaactgcctgagagactgcaatgttgccatccgatggctgatgcttcatacagcagactcagcctgtgacccaaacaacaaacgccttcgtcaaatcaaggaccagattctaacagactctcggtacaatcccagga

SEQ ID NO: 2917 - DNA, 1957 bp, Artificial
  cDNA Sequence
cttgctgatgtcttttcaggagtgaaacccctaaccagagtggagaaaaatgaaaaccttcaagcttggttcagagagatctcaaaacaaatattgtctttaaattatgatgattctactgctgcgggcagaaaaactgtacaactgatacaagctttggaagaggttcaagaattccaccagttggaatccaatctgcaagtatgtcagtttcttgccgatactcgaaagtttcttcatcaaatgatcagaaccattaacattaaagaggaggttctgatcacaatgcagatcgttggggacctttctttcgcttggcagttgattgacagtttcacatccatcatgcaagaaagcataagggtaaatccatccatggttactaaactcagagctaccttcctaaagcttgcctctgccctcgatctgccccttcttcgtattaatcaggcaaatagccccgacctgctcagcgtgtcacagtactattctggagagttggtatcctatgtgagaaaagttttgcagatcatcccagaaagcatgtttacatctcttctaaagatcataaagcttcagacccacgacattattgaagtgcctacccgcctggacaaagacaagctgagggactatgctcagctaggcccacgatacgaggttgccaagcttactcatgctatttccatttttactgaaggcatcttaatgatgaaaacgactttggttggcatcatcaaggtggatccaaagcagttgctggaagatggaataaggaaagagcttgtgaagcgcgttgcctttgccctgcataggggactgatattcaaccctcgagccaagccaagtgaattgatgcccaagctgaaagagttgggagcgaccatggatggattccatcgttcttttgaatacatacaggactatgtcaacatttatggtctgaagatttggcaggaagaagtatctcgtatcataaattacaacgtggagcaagagtgtaataactttctaagaacgaagattcaagattggcaaagcatgtaccagtccactcatattccaatacccaagtttacccctgtggatgagtctgtaacgtttattggtcgactctgcagagaaatcctgcggatcacagacccaaaaatgacatgtcacatagaccagctgaacacttggtatgatatgaaaactcatcaggaagtgaccagcagccgcctcttctcagaaatccagaccaccttgggaacctttggtctaaatggcttagacaggcttctgtgctttatgattgtaaaagagttacagaatttcctcagtatgtttcagaaaattatcctgagagacagaactgttcaggacactttaaaaaccctcatgaatgctgtcagtcccctaaaaagtattgtcgcaaattcaaataaaatttatttttccgccattgccaaaacacagaagatttggactgcgtatctcgaggctataatgaaggttgggcagatgcagattctgagacaacagattgccaatgaattaaattattcttgtcggtttgattctaaacatctggcagctgctctggagaatctcaataaggctctcctagcagacattgaagcccactatcaggacccttcacttccttaccccaaagaagataacacacttttatatgaaatcacagcctatctggaggcagctggcattcacaacccactgaataagatatacataacaacaaagcgcttaccctattttccaattgtaaactttctatttttgatcgctcagttgccaaaacttcaatacaacaaaaatctgggaatggtctgccgaaaaccgaccgacccggttgattggccaccacttgtcctgggactgctcactctgctgaagcagttccattcccggtacaccgagcagttcctggcgctgattggccagtttatctgct

SEQ ID NO: 2918 - DNA, 1957 bp, Artificial; identical to SEQ ID NO: 2917
  cDNA Sequence

SEQ ID NO: 2919 - DNA, 1830 bp, Artificial
  cDNA Sequence
cttgctgatgtcttttcaggagtgaaacccctaaccagagtggagaaaaatgaaaaccttcaagcttggttcagagagatctcaaaacaaatattgtctttaaattatgatgattctactgctgcgggcagaaaaactgtacaactgatacaagctttggaagaggttcaagaattccaccagttggaatccaatctgcaagtatgtcagtttcttgccgatactcgaaagtttcttcatcaaatgatcagaaccattaacattaaagaggaggttctgatcacaatgcagatcgttggggacctttctttcgcttggcagttgattgacagtttcacatccatcatgcaagaaagcataagggtaaatccatccatggttactaaactcagagctaccttcctaaagcttgcctctgccctcgatctgccccttcttcgtattaatcaggcaaatagccccgacctgctcagcgtgtcacagtactattctggagagttggtatcctatgtgagaaaagttttgcagatcatcccagaaagcatgtttacatctcttctaaagatcataaagcttcagacccacgacattattgaagtgcctacccgcctggacaaagacaagctgagggactatgctcagctaggcccacgatacgaggttgccaagcttactcatgctatttccatttttactgaaggcatcttaatgatgaaaacgactttggttggcatcatcaaggtggatccaaagcagttgctggaagatggaataaggaaagagcttgtgaagcgcgttgcctttgccctgcataggggactgatattcaaccctcgagccaagccaagtgaattgatgcccaagctgaaagagttgggagcgaccatggatggattccatcgttcttttgaatacatacaggactatgtcaacatttatggtctgaagatttggcaggaagaagtatctcgtatcataaattacaacgtggagcaagagtgtaataactttctaagaacgaagattcaagattggcaaagcatgtaccagtccactcatattccaatacccaagtttacccctgtggatgagtctgtaacgtttattggtcgactctgcagagaaatcctgcggatcacagacccaaaaatgacatgtcacatagaccagctgaacacttggtatgatatgaaaactcatcaggaagtgaccagcagccgcctcttctcagaaatccagaccaccttgggaacctttggtctaaatggcttagacaggcttctgtgctttatgattgtaaaagagttacagaatttcctcagtatgtttcagaaaattatcctgagagacagaactgttcaggacactttaaaaaccctcatgaatgctgtcagtcccctaaaaagtattgtcgcaaattcaaataaaatttatttttccgccattgccaaaacacagaagatttggactgcgtatctcgaggctataatgaaggttgggcagatgcagattctgagacaacagattgccaatgaattaaattattcttgtcggtttgattctaaacatctggcagctgctctggagaatctcaataaggctctcctagcagacattgaagcccactatcaggacccttcacttccttaccccaaagaagataacacacttttatatgaaatcacagcctatctggaggcagctggcattcacaacccactgaataagatatacataacaacaaagcgcttaccctattttccaattgtaaactttctatttttgatcgctcagttgccaaaacttcaatacaacaaaaatctgggtacg

SEQ ID NO: 2920 - DNA, 1361 bp, Artificial
  cDNA Sequence
cttgctgatgtcttttcaggagtgaaacccctaaccagagtggagaaaaatgaaaaccttcaagcttggttcagagagatctcaaaacaaatattgtctttaaattatgatgattctactgctgcgggcagaaaaactgtacaactgatacaagctttggaagaggttcaagaattccaccagttggaatccaatctgcaagtatgtcagtttcttgccgatactcgaaagtttcttcatcaaatgatcagaaccattaacattaaagaggaggttctgatcacaatgcagatcgttggggacctttctttcgcttggcagttgattgacagtttcacatccatcatgcaagaaagcataagggtaaatccatccatggttactaaactcagagctaccttcctaaagcttgcctctgccctcgatctgccccttcttcgtattaatcaggcaaatagccccgacctgctcagcgtgtcacagtactattctggagagttggtatcctatgtgagaaaagttttgcagatcatcccagaaagcatgtttacatctcttctaaagatcataaagcttcagacccacgacattattgaagtgcctacccgcctggacaaagacaagctgagggactatgctcagctaggcccacgatacgaggttgccaagcttactcatgctatttccatttttactgaaggcatcttaatgatgaaaacgactttggttggcatcatcaaggtggatccaaagcagttgctggaagatggaataaggaaagagcttgtgaagcgcgttgcctttgccctgcataggggactgatattcaaccctcgagccaagccaagtgaattgatgcccaagctgaaagagttgggagcgaccatggatggattccatcgttcttttgaatacatacaggactatgtcaacatttatggtctgaagatttggcaggaagaagtatctcgtatcataaattacaacgtggagcaagagtgtaataactttctaagaacgaagattcaagattggcaaagcatgtaccagtccactcatattccaatacccaagtttacccctgtggatgagtctgtaacgtttattggtcgactctgcagagaaatcctgcggatcacagacccaaaaatgacatgtcacatagaccagctgaacacttggtatgatatgaaaactcatcaggaagtgaccagcagccgcctcttctcagaaatccagaccaccttgggaacctttggtctaaatggcttagacaggcttctgtgctttatgattgtaaaagagttacaggtgagccttttgactttcatgcctgttttctgccaccctgggggagaggc

SEQ ID NO: 2921 - DNA, 455 bp, Artificial
  cDNA Sequence
agattcaagattggcaaagcatgtaccagtccactcatattccaatacccaagtttacccctgtggatgagtctgtaacgtttattggtcgactctgcagagaaatcctgcggatcacagacccaaaaatgacatgtcacatagaccagctgaacacttggtatgatatgaaaactcatcaggaagtgaccagcagccgcctcttctcagaaatccagaccaccttgggaacctttggtctaaatggcttagacaggcttctgtgctttatgattgtaaaagagttacagaatttcctcagtatgtttcagaaaattatcctgagagacagaactgttcaggacactttaaaaaccctcatgaatgctgtcagtcccctaaaaagtattgtcgcaaattcaaataaaatttatttttccgccattgccaaaacacagaagatttggactgcgtat

SEQ ID NO: 2922 - DNA, 811 bp, Artificial
  cDNA Sequence
agaatgacatgtcacatagaccagctgaacacttggtatgatatgaaaactcatcaggaagtgaccagcagccgcctcttctcagaaatccagaccaccttgggaacctttggtctaaatggcttagacaggcttctgtgctttatgattgtaaaagagttacagaatttcctcagtatgtttcagaaaattatcctgagagacagaactgttcaggacactttaaaaaccctcatgaatgctgtcagtcccctaaaaagtattgtcgcaaattcaaataaaatttatttttccgccattgccaaaacacagaagatttggactgcgtatctcgaggctataatgaaggttgggcagatgcagattctgagacaacagattgccaatgaattaaattattcttgtcggtttgattctaaacatctggcagctgctctggagaatctcaataaggctctcctagcagacattgaagcccactatcaggacccttcacttccttaccccaaagaagataacacacttttatatgaaatcacagcctatctggaggcagctggcattcacaacccactgaataagatatacataacaacaaagcgcttaccctattttccaattgtaaactttctatttttgatcgctcagttgccaaaacttcaatacaacaaaaatctgggaatggtctgccgaaaaccgaccgacccggttgattggccaccacttgtcctgggactgctcactctgctgaagcagttccattcccggtacaccgagcagttcctggcgctgattggccagtttatctgct

SEQ ID NO: 2923 - DNA, 684 bp, Artificial
  cDNA Sequence
agaatgacatgtcacatagaccagctgaacacttggtatgatatgaaaactcatcaggaagtgaccagcagccgcctcttctcagaaatccagaccaccttgggaacctttggtctaaatggcttagacaggcttctgtgctttatgattgtaaaagagttacagaatttcctcagtatgtttcagaaaattatcctgagagacagaactgttcaggacactttaaaaaccctcatgaatgctgtcagtcccctaaaaagtattgtcgcaaattcaaataaaatttatttttccgccattgccaaaacacagaagatttggactgcgtatctcgaggctataatgaaggttgggcagatgcagattctgagacaacagattgccaatgaattaaattattcttgtcggtttgattctaaacatctggcagctgctctggagaatctcaataaggctctcctagcagacattgaagcccactatcaggacccttcacttccttaccccaaagaagataacacacttttatatgaaatcacagcctatctggaggcagctggcattcacaacccactgaataagatatacataacaacaaagcgcttaccctattttccaattgtaaactttctatttttgatcgctcagttgccaaaacttcaatacaacaaaaatctgggtacg

SEQ ID NO: 2924 - DNA, 652 bp, Artificial
  cDNA Sequence
ttttagaatttcctcagtatgtttcagaaaattatcctgagagacagaactgttcaggacactttaaaaaccctcatgaatgctgtcagtcccctaaaaagtattgtcgcaaattcaaataaaatttatttttccgccattgccaaaacacagaagatttggactgcgtatctcgaggctataatgaaggttgggcagatgcagattctgagacaacagattgccaatgaattaaattattcttgtcggtttgattctaaacatctggcagctgctctggagaatctcaataaggctctcctagcagacattgaagcccactatcaggacccttcacttccttaccccaaagaagataacacacttttatatgaaatcacagcctatctggaggcagctggcattcacaacccactgaataagatatacataacaacaaagcgcttaccctattttccaattgtaaactttctatttttgatcgctcagttgccaaaacttcaatacaacaaaaatctgggaatggtctgccgaaaaccgaccgacccggttgattggccaccacttgtcctgggactgctcactctgctgaagcagttccattcccggtacaccgagcagttcctggcgctgattggccagtttatctgct

SEQ ID NO: 2925 - DNA, 652 bp, Artificial; identical to SEQ ID NO: 2924
  cDNA Sequence

SEQ ID NO: 2926 - DNA, 411 bp, Artificial
  cDNA Sequence
aggttgggcagatgcagattctgagacaacagattgccaatgaattaaattattcttgtcggtttgattctaaacatctggcagctgctctggagaatctcaataaggctctcctagcagacattgaagcccactatcaggacccttcacttccttaccccaaagaagataacacacttttatatgaaatcacagcctatctggaggcagctggcattcacaacccactgaataagatatacataacaacaaagcgcttaccctattttccaattgtaaactttctatttttgatcgctcagttgccaaaacttcaatacaacaaaaatctgggaatggtctgccgaaaaccgaccgacccggttgattggccaccacttgtcctgggactgctcactctgctgaagcagt

SEQ ID NO: 2927 - DNA, 601 bp, Artificial
  cDNA Sequence
tgagctcctggctggagaattcgctcacaagggtgatgtgatcatcttacgtgtaaaagaaaaccgaatttcacttctggtggtgactattgtctgattcatcattacagtaaccacccaaggaaaccctgcccacaaaaagcattcttctggagaagtaacagtttttggtgacacacatgatggcaacaatgaacgctttgtggcacgatgacctctatgaaaaagagagatatacaggttttgcttttgttcactcaactaattaccaacctttcattatacctctactcggacatctaaacttcagttaagctctatgtttaagtgggatggatcttcaatttgcctacctaaggatttgaagtcaggtttacagaggcatcattttacaattatcaactttgataaatgcagattgtcatggaactaccaccagaatccagatagagaacatgctatcatccctgttatatccctttgtggctaatccaccacactgttccatccaccaaagtccctagaagccactgatctgttttatgtccctctggttttgtctttttcaaagtctgaaataaatggaattgtggagtgtgta

SEQ ID NO: 2928 - DNA, 467 bp, Artificial
  cDNA Sequence
tctgctgtcctctggggagaatgcatttgaactcatctcaaaaagctggttttctaccctggaggtctccgatggctactgcgagaagaaagccatgtcccgaaagcagtgatacagattggcagccactgcagagatgcagaatgtcgaagagtgtgtgtgttggaattcctggacagacactgctctgaaagaaaaaccctctggttttggaagtctggctgggcaaggcaggcggaggtcatggaggggccggcgtgatggaatcctcggtgcagctgactgcgcagcccgacactggcgtggacactgggacgcgtcatgcaacatccaaccagagcacactcacgaggacaaacatgggcccacctatttaccatcagaaaaacaaaatcatgctctttcactttgaaagaagggggaaactggaaagttattatttgaaataaaatggaattttaggataa

SEQ ID NO: 2929 - DNA, 588 bp, Artificial
  cDNA Sequence
ttgttccaagcactttttttattctattgagtcatacaatttgccattatgttgatcaaaaacagttgaacacaatggtcctttgtgggacaggggtgactgattccaggactccccgataccaaaatccaggatgctcaagtccctggtgtaaatgcctgcgtgtaacccacgcacatcctcccgtacactgtaaatcatctctagattacttataataatgcaatgtaaatgctctataaattctgctgtgttgtttagggaataacaaaaaaaagcctgtatatgttcagtacagatataaacatctatttttctttaatattttcaggctgtggttgcttgaatccaaagatgtggaatccacggatacacagggccaactgtacttgtaacttcccacaacatcctctaaaacttgagggtgtcccatctattgagtcgcagtgagtatctaaaaatcatttatctatgtatacactcataacctgtgcgtggattcaacacaagttttgctacaggagaaaagacttgccttctacatctttgttgactcaatatgcatttcagtgtaacagaccctcacat

SEQ ID NO: 2930 - DNA, 441 bp, Artificial
  cDNA Sequence
gaaatgacttttaaggcatgttgagagccacaaattacactgctttacaattcgaatgtataccatcggaaaacatctcaggctagacataaatacgatgatggctctagctttggaaagagaagcttcagctgttcaagtcacgtgtggccagatgcagagcataaggaatgcaaaacagacagttgcaactgctggtttttaccagtccatctaaaatacacttcgtacactgtagtggatgctagaaatttcaaatacaaatgatgcatttatagcccctataaatatatccttccttatagctatttaagtcattcccctaaaatattcttcagttagaaaaattaattttaaaataaagatactttttaaagaacaggagacattctaaagtcatagtaaaagttttctcatccaatggtgggtgggagggtggtc

SEQ ID NO: 2931 - DNA, 479 bp, Artificial
  cDNA Sequence
tcttgtttggggattggagagggaagtgcgtctggatgactactaagatgaggaggctgaggcctagtgctcctagcgggcttggtcaagagcaggaggcggaggtggtggaaggctgtttccctgcgcattctagcctgtgagaagaagaaatgtgtgaaaattctggagctttcctctcccagggataactggaggccttgaggattgaaagagaaagcgtcggttttttgtccttgagatagtttgctgagaatgatggtttccagcttcatccatgtccctacaaaggacacgaactcatcatttttttatggctgcatagtattccatggtgtatatgtgccacattttcttaatccagtctatcattgttggacatttgggttggttccaagtctttgctattgtgaatagtgccgtaataaacatgtaccctaaaacttaaagtataataaaaagaaaaaaaagaaaagaaa

SEQ ID NO: 2932 - DNA, 465 bp, Artificial
  cDNA Sequence
gatggagttttaacattgaatgcggagaacactaattatgcctatcaagttccaaacttccataaatgtgaaatctgtctactatcttttccaaaagaatcccagtttcaacgccacatgagggatcacgagcgaaatgacaagccacatcgatgtgaccagtgcccccaaacatttaatgttgaattcaacctgacacttcataaatgcacccacagcggggaagatcctacctgccctgtgtgtaacaagaaattctccagagtggctagtctcaaagcgcatattatgctacatgaaaaggaagagaatctcatctgttctgagtgtggggatgagtttactctgcagagtcagctggccgtgcacatggaggagcaccgccaggagctggctggaacccggcagcatgcctgcaaggcctgcaagaaagagttcgagacctcctcggagctgaaggaacac

SEQ ID NO: 2933 - DNA, 885 bp, Artificial
  cDNA Sequence
agcttaaacacgcatatcagcaagatgcatatgggtgggccacagaattcaacaagttctacagagactgctcatgttttaacggccacactttttcagacgttacctcttcaacagacggaagcccaagccacgtcggcctcaagccagccgagctcccaggcggtgagcgacgtcatccagcagctcctggagctctcagagccggcgccggtggagtcggggcagtccccgcagcctgggcagcagctgagcatcacagtgggcatcaaccaggacattttacagcaagccttagaaaacagtgggctgtcttcaattccagctgcagcacatcctaatgactcctgccatgccaagacctctgcaccacacgctcaaaacccagatgtttccagcgtttcaaatgagcagacggaccccacagacgcagagcaagaaaaagaacaggaaagcccggagaaactggataaaaaagaaaaaaaaatgataaagaagaagtcaccgtttctacctggctccatccgcgaggagaacggcgtgcgctggcatgtgtgtccctactgcgccaaggagttccgcaagcccagcgacctggtccgccacatccgcatccacacccacgagaagcccttcaagtgcccgcagtgcttccgcgccttcgccgtgaagagcacgctgacagcgcacatcaagacgcacaccggcatcaaggcgttcaagtgccagtactgcatgaagagcttctccacctctggcagcctcaaggtgcacattcgcctgcacacaggtatggcctcagggctgggcccacacgggcactggccacgggggccacacacattactgcgcacatataccaaacacaggtatggcacacagtag

SEQ ID NO: 2934 - DNA, 736 bp, Artificial
  cDNA Sequence
agcttaaacacgcatatcagcaagatgcatatgggtgggccacagaattcaacaagttctacagagactgctcatgttttaacggccacactttttcagacgttacctcttcaacagacggaagcccaagccacgtcggcctcaagccagccgagctcccaggcggtgagcgacgtcatccagcagctcctggagctctcagagccggcgccggtggagtcggggcagtccccgcagcctgggcagcagctgagcatcacagtgggcatcaaccaggacattttacagctgcagcacatcctaatgactcctgccatgccaagacctctgcaccacacgctcaaaacccagatgtttccagcgtttcaaatgagcagacggaccccacagacgcagagcaagaaaaagaacaggaaagcccggagaaactggataaaaaagaaaaaaaaatgataaagaagaagtcaccgtttctacctggctccatccgcgaggagaacggcgtgcgctggcatgtgtgtccctactgcgccaaggagttccgcaagcccagcgacctggtccgccacatccgcatccacacccacgagaagcccttcaagtgcccgcagtgcttccgcgccttcgccgtgaagagcacgctgacagcgcacatcaagacgcacaccggcatcaaggcgttcaagtgccagtactgcatgaagagcttctccacctctggcagcctcaaggtgca

SEQ ID NO: 2935 - DNA, 759 bp, Artificial
  cDNA Sequence
caaaaaatttcgaacctcaggccataggaagactcacattgcttcccactttaaacatacggaattaaggaaaatgaggcaccagcgtaaacctgcaaaggtccgtgttggcaagacgaatattccagtccctgatattcctttgcaggaaccaatcctcataactgacttaggtctcatccagcccattccaaaaaaccagtttttccaaagctatttcaataataattttgtcaatgaagcagatagaccatacaagtgtttttactgtcatcgtgcatataaaaaatcttgccaccttaaacaacacatcagatcccatacaggtgaaaaaccttttaaatgttctcagtgtggaagaggctttgtttctgcaggcgtgctcaaagcacacatcagaacacacacaggactgaaatctttcaagtgtctgatatgtaatggggctttcactactggtggcagcttacggcgacacatgggtatccacaacgaccttcgtccctatatgtgtccctattgccaaaaaacatttaagacttcactaaattgcaaaaagcacatgaaaacccacagatatgagcttgcccagcagctccaacagcatcagcaggcagcctcgatagatgacagcactgtagaccagcagagcatgcaggcctccactcaaatgcaggtggagatcgagagcgacgagctgccgcagacggcagaggtggtcgcagcgaaccccgaggccatgctggacctggagcctca

SEQ ID NO: 2936 - DNA, 1967 bp, Artificial
  cDNA Sequence
ctgatggcttcgctgtcttctgtaaaaattgctatgagagaacttttcactcactgttttgcagtttctccctcagtccctggttctttcttctcacataatcccaatttcaatttatagttcatggcccaggcagagtcattcatcacggcatctcctgagctaaaccagcacctgctctgctcacttcttgactggctgctcatcatcagccctctgcagagatttcatttcctccgtgccagtagccatcgaccctctgatgaggatgccccctccaacaggcaccgccaggcagccctgcctggagacccagaggcaccgagtcacatttgctctgcacacctggctctcgcttgatgtgggcctgtgtgctacagcccggaacacaaaagaagacacccatgcaaataccattaaaagtttattgttttatttcaatattcaggaacagtgtacactttccgttcagccatcgtcacagcacgtgctgtgtgggtgcggccacgtatggatcgcagagccgacctcagctcagcgacgcagagtgcttctgctgaaaaatttggaggtttgtgtctggagttttgttctttgtaactctctcatcatcgaggctatatattaatagacatggtattaagcccacacgaaacattcagaattagaattggattaagaagacgcgttttggcatcacgctgactactcctcatctccgtcctcggggagggtgatgccagcgtgggactctttggaaggcctatcaatcacaggtgcgctaaaatcaaaaggtgggtcagtaggttagggagggaggcgcgaaaggagatgccagcgggtgttaagaaggatatggtcagaagagctctttgtctccatccacggggccgtctgctcagcccgtgtgtctcggtgagtaattcgggagcaggtgcacgcctgtgcctactcgctaccacgcgtcttctgggaggaagtgaatgagccggttatcttctcagggagggttagtgctggccactgtgcactgccgctgccagcacgcccggtcacagccagtgtctatgggcgactggcgcggctgcgaggctgtctagaggactcctacccttctgctctgagtgcgcaagtcttcctggactctccggctgtgggctgtggtttggaaacgaggttgttcatagaggctgctctggggccaccatgcagggcaacggtgacgtccagaggccacctgcttgacatctccatcaccaaatctccaggaagaccctgtttcctatgtgaggccattgcccagcccacgtttgcctccttttcctccctctgccacacgcgaattcagctaattggggtgtgtgggcagccacggcctggggaggtggccccctctctgtgctgccccacgttggactctaacagctgcccagcccgcatgtcacataccaaaagctcccacatgtagtaagccactccttgactgtctaatcctgttaggaaaaatgaagtctactttaggaggtgagagaaggacaggaaaaaaaaacaaaggaagcttggatgtcaacagtcctctctgccgcccacgtcctctctgtctctgcagctgtgtgcctccatggcagtgaccagcaaaagcgcaagggtgccgcagccacggcgaaaagaaagtccaagggtggaggggtgaacgtggagggacgtctgtgcacctggccccctgaagacccacgtgcgtctgggggcacattgcgggggaaggaacgtgatcttcacacagaaagggacagttttaaccgttttctgttttcatgttctcatttaactgttggccggaaattgccggtaggctgccgtggcctgaccctactacgtgcacaactccgcaggcattaggggaggggtcatctgctctaattaggtaacaggggcaagtgggattaaagttttaaggcagttatatt

SEQ ID NO: 2937 - DNA, 1356 bp, Artificial
  cDNA Sequence
gcattcaaatttttattcaaagtttagtctctctccttgggtttcccctcttttatgaaatgatcaattttggcgaagagcccccagaaagcaagatagaaaagaaatatgctctttaccgtggccgatcagcaacgaaccaacactgtcctcatctaattctacgtcttccacactgcccagtaacacaaataaccagagcgcagacgccaagaatccttccaagtaacgcagctaacagaccaaggtgacagttctgacttcttggggggttttccaagtacatacgtagcattataaacaagcctctatgttgtgcttacacaactcactcaagggatttttgttttcacaagtgaaaacgtttatgaaatgctagcctgcgaagccgcttcaggaaccatctagtgagatttccctcccaagacaggcagctttctcacataccgtggaggcctcctgccggcctggggactgacaggtgcagggccctgcccctcgagggccagcctctccctcgggagcgtgggtttttcctgtttgatcctggcttaacttgaacatctctggcattggagctgccctctggagtagcccagaagttggcactcacctcaccttttgctgcatttccaagagatcagcctttggacttcctggaaagtggtagaaccactgtcctatgaaacaaagtgcttctgtgctgaaatggagtaagttccctgcagcctctggcaaggtaacctaccgagcacctcctggagtaggtgttcctatcatcctctctttatagctcaggagccaaagctcagccagcccgaaggagccaggattagagcctgcatggatgcaacagtcacgcttctctctattacgtgtcttgcaacttggagtcacatgatctcagcatctgatccaccctgggctcagaacctcccagaacctcccagaatcgaggctcacggcagaggttctgcactcaccaaggacgcggggggaccatgtctgtgctcatgtggatccccgctgctgggcagagcacaccacacatccagactcaacaaaatacatggagtcaaaggtcaggtgactgaatcaatgagtatgttacacaccaagaaagacccctcctctctgcaccccggggagcagccccagaagcctggtctcctccaggatgaaaatgcaaacgcaggtgcctgggggctcccagagcctttggcttcacggttccctcccggccctgcctggagcttcatgtgcctccccttttgcttaatgagagccgctgtctaagagttaagggttttctgggtgacgtttaacaataataaaggtgactgcttatctaaggaa

SEQ ID NO: 2938 - DNA, 1503 bp, Artificial
  cDNA Sequence
gcattcaaatttttattcaaagtttagtctctctccttgggtttcccctcttttatgaaatgatcaattttggcgaagagcccccagaaagcaagatagaaaagaaatatgctctttaccgtggccgatcagcaacgaaccaacactgtcctcatctaattctacgtcttccacactgcccagtaacacaaataaccagagcgcagacgccaagaatccttccaagtaacgcagctaacagaccaaggtgacagttctgacttcttggggggttttccaagtacatacgtagcattataaacaagcctctatgttgtgcttacacaactcactcaagggatttttgttttcacaagtgaaaacgtttatgaaatgctagcctgcgaagccgcttcaggaaccatctagtgagatttccctcccaagacaggcagctttctcacataccgtggaggcctcctgccggcctggggactgacaggtgcagggccctgcccctcgagggccagcctctccctcgggagcgtgggtttttcctgtttgatcctggcttaacttgaacatctctggcattggagctgccctctggagtagcccagaagttggcactcacctcaccttttgctgcatttccaagagatcagcctttggacttcctggaaagtggtagaaccactgtcctatgaaacaaagtgcttctgtgctgaaatggagtaagttccctgcagcctctggcaaggtaacctaccgaggtacaatcttaactttcttgatgcccccttttgacattgaaaatggtgggtgtattggttttactttttatcattgaaactacaatttgttgagcactgaccatgcaggaaacccgtttttccccgttttctcttttgtgctcacagcacctcctggagtaggtgttcctatcatcctctctttatagctcaggagccaaagctcagccagcccgaaggagccaggattagagcctgcatggatgcaacagtcacgcttctctctattacgtgtcttgcaacttggagtcacatgatctcagcatctgatccaccctgggctcagaacctcccagaacctcccagaatcgaggctcacggcagaggttctgcactcaccaaggacgcggggggaccatgtctgtgctcatgtggatccccgctgctgggcagagcacaccacacatccagactcaacaaaatacatggagtcaaaggtcaggtgactgaatcaatgagtatgttacacaccaagaaagacccctcctctctgcaccccggggagcagccccagaagcctggtctcctccaggatgaaaatgcaaacgcaggtgcctgggggctcccagagcctttggcttcacggttccctcccggccctgcctggagcttcatgtgcctccccttttgcttaatgagagccgctgtctaagagttaagggttttctgggtgacgtttaacaataataaaggtgactgcttatctaaggaa

SEQ ID NO: 2939 - DNA, 702 bp, Artificial
  cDNA Sequence
gaaaaaaagagaaacctgggtgaactttcacggacaacctcagaggacaacgaagtgttcggagaggcagatgcgaaccagaacaatgggacctcctctcaggacacagcggtgactgactccaagcgcacagcggacccgaagaatgcctggcaggatgcccacccagctgacccagggagccgcccccacttgatccgcctcttttcccgagatgccccggggagggaggacaacaccttcaaagacaggccctctgagtccgacgagctccagaccatccaagaagacagtgcagccacctccgagagcctggatgtgatggcgtcacagaagagaccctcccagaggcacggatccaagtacctggccacagcaagtaccatggaccatgccaggcatggcttcctcccaaggcacagagacacgggcatccttgactccatcgggcgcttctttggcggtgacaggggtgcgcccaagcggggctctggcaaggtgagctctgaggagtagaggagttttagtttaaatggaaaaagcaaaggagaaatcagtaggtgaactcagccattagaggaagaactggcacgtagcctcttgctgtctaaggtctcgttccgtgctggagaatgcatatgagcccaagagtgtgggcctgagtggctgcttaggacgttttcgtttaactcaccccctctt

SEQ ID NO: 2940 - DNA, 733 bp, Artificial
  cDNA Sequence
aacaccttcaaagacaggccctctgagtccgacgagctccagaccatccaagaagacagtgcagccacctccgagagcctggatgtgatggcgtcacagaagagaccctcccagaggcacggatccaagtacctggccacagcaagtaccatggaccatgccaggcatggcttcctcccaaggcacagagacacgggcatccttgactccatcgggcgcttctttggcggtgacaggggtgcgcccaagcggggctctggcaaggactcacaccacccggcaagaactgctcactacggctccctgccccagaagtcacacggccggacccaagatgaaaaccccgtagtccacttcttcaagaacattgtgacgcctcgcacaccacccccgtcgcagggaaaggggagaggactgtccctgagcagatttagctggggggccgaaggccagagaccaggatttggctacggaggcagagcgtccgactataaatcggctcacaagggattcaagggagtcgatgcccagggcacgctttccaaaatttttaagctgggaggaagagatagtcgctctggatcacccatggctagacgctgaaaacccacctggttccggaatcctgtcctcagcttcttaatataactgccttaaaactttaatcccacttgcccctgttacctaattagagcagatgacccctcccctaatgcctgcggagttgtgcacg

SEQ ID NO: 2941 - DNA, 793 bp, Artificial
  cDNA Sequence
cagaccatccaagaagacagtgcagccacctccgagagcctggatgtgatggcgtcacagaagagaccctcccagaggcacggatccaagtacctggccacagcaagtaccatggaccatgccaggcatggcttcctcccaaggcacagagacacgggcatccttgactccatcgggcgcttctttggcggtgacaggggtgcgcccaagcggggctctggcaaggactcacaccacccggcaagaactgctcactacggctccctgccccagaagtcacacggccggacccaagatgaaaaccccgtagtccacttcttcaagaacattgtgacgcctcgcacaccacccccgtcgcagggaaagggggccgaaggccagagaccaggatttggctacggaggcagagcgtccgactataaatcggctcacaagggattcaagggagtcgatgcccagggcacgctttccaaaatttttaagctgggaggaagagatagtcgctctggatcacccatggctagacgctgaaaacccacctggttccggaatcctgtcctcagcttcttaatataactgccttaaaactttaatcccacttgcccctgttacctaattagagcagatgacccctcccctaatgcctgcggagttgtgcacgtagtagggtcaggccacggcagcctaccggcaatttccggccaacagttaaatgagaacatgaaaacagaaaacggttaaaactgtccctttctgtgtgaagatcacgttccttcccccgcaatgtgccccc

SEQ ID NO: 2942 - DNA, 728 bp, Artificial
  cDNA Sequence
agaccatccaagaagacagtgcagccacctccgagagcctggatgtgatggcgtcacagaagagaccctcccagaggcacggatccaagtacctggccacagcaagtaccatggaccatgccaggcatggcttcctcccaaggcacagagacacgggcatccttgactccatcgggcgcttctttggcggtgacaggggtgcgcccaagcggggctctggcaaggtaccctggctaaagccgggccggagccctctgccctctcatgcccgcagccagcctgggctgtgcaacatgtacaaggactcacaccacccggcaagaactgctcactacggctccctgccccagaagtcacacggccggacccaagatgaaaaccccgtagtccacttcttcaagaacattgtgacgcctcgcacaccacccccgtcgcagggaaaggggagaggactgtccctgagcagatttagctggggggccgaaggccagagaccaggatttggctacggaggcagagcgtccgactataaatcggctcacaagggattcaagggagtcgatgcccagggcacgctttccaaaatttttaagctgggaggaagagatagtcgctctggatcacccatggctagacgctgaaaacccacctggttccggaatcctgtcctcagcttcttaatataactgccttaaaactttaatcccacttgcccctgttacctaatt

SEQ ID NO: 2943 - DNA, 710 bp, Artificial
  cDNA Sequence
cagggtccacctcctgcaaagggcgaagggggcgctcctcctctacctccccgcgagcccccctcgaaggcagcccaggagctgaggactctggccacctgtgctgcggggtccaggggcgacgcggccttgcaggcccagcccggcgtggctggggcgcccccccgtcctacactccatcaaacaggagccggtggccgaggggcatgagaagcgcctggacatcctcaacatctttaagacgtacattccaaaggactttgcgaccctctaccagggatggggtgtcagcggccctgggttggagcacagagggacactccggacgcaggcccggccaggagagttcgtctgcatcgagtgcggaaagagcttccaccagcccggccacctcagggcccacatgcgggcacactcaggggagagaccattctaacacaggtaccgtccagacagtgcctctgagaaagggaacctaaaggcgtgtttccgacgcaccccaggtccccgtaacggccattagcagtaccctcacgatgtcccagcagcctcccacctgtgacctggccgctccatggaagaacagccggggaactcctgagcagacacctcacatcccgagccgctgcgctggagtggaaactgaaggcagatgcctctccttgttaaacgttcagaaataaatgaagatgctatattctagaaataca

SEQ ID NO: 2944 - DNA, 607 bp, Artificial
  cDNA Sequence
acactccatcaaacaggagccggtggccgaggggcatgagaagcgcctggacatcctcaacatctttaagacgtacattccaaaggactttgcgaccctctaccagggatggggtgtcagcggccctgggttggagcacagagggacactccggacgcaggcccggccaggagagttcgtctgcatcgagtgcggaaagagcttccaccagcccggccacctcagggcccacatgcgggcacactcagtggtgtttgagtccgatgggcctcggggttctgaagttcataccacctccgcagacgcccccaaacaagggagagaccattctaacacaggtaccgtccagacagtgcctctgagaaagggaacctaaaggcgtgtttccgacgcaccccaggtccccgtaacggccattagcagtaccctcacgatgtcccagcagcctcccacctgtgacctggccgctccatggaagaacagccggggaactcctgagcagacacctcacatcccgagccgctgcgctggagtggaaactgaaggcagatgcctctccttgttaaacgttcagaaataaatgaagatgctatattctagaaataca

SEQ ID NO: 2945 - DNA, 613 bp, Artificial
  cDNA Sequence
agcgggccgccggcggtcgtgggcaagcttcgccatgcagagcactgacctaggcaacaaggagagcggcaagatatggcaccgcaagccgtccccggccacgcgggacggaattatagtgaacattattcacaacacttccgattaccatccaaaagttttgcgatttttgaatgtggcttttgatggcacaggcgactgcttaattgctggggaccaccaaggaaatatttatgtttttgacttacatggaaacaggttcaatcttgttcagcgaacagcacaagcttgcacagctctggcctttaatcttcgtaggaaatctgaattccttgtggcattagctgattattctattaaatgttttgatacagtcaccaaggagctagttagctggatgagaggacatgaatcatcagtattttcgatctctgtgcatgcatcagggaaatatgccatcacaacttcttctgatacagcacaattatgggacttggatacctttcagagaaaaagaaagctgaatattcgccagtctgtgggtatacagaaggttttctttctaccattaagtaataccatcctcagctgttttaaagataattccattttt

SEQ ID NO: 2946 - DNA, 879 bp, Artificial
  cDNA Sequence
acaattctgcctcttccaaaggctgcagtttatccatccttaaatccttggatgtgtttagacgcacaagcattcatcaactatttgttgagctcctactgtgtgccaagcacgcctctaagcgctggggacggcgatggaacaaaacacacttccggttctctggagtttacatatcggcgtaattatagtgaacattattcacaacacttccgattaccatccaaaagttttgcgatttttgaatgtggcttttgatggcacaggcgactgcttaattgctggggaccaccaaggaaatatttatgtttttgacttacatggaaacaggttcaatcttgttcagcgaacagcacaagcttgcacagctctggcctttaatcttcgtaggaaatctgaattccttgtggcattagctgattattctattaaatgttttgatacagtcaccaaggagctagttagctggatgagaggacatgaatcatcagtattttcgatctctgtgcatgcatcagggaaatatgccatcacaacttcttctgatacagcacaattatgggacttggatacctttcagagaaaaagaaagctgaatattcgccagtctgtgggtatacagaaggttttctttctaccattaagtaataccatcctcagctgttttaaagataattccatttttgcctgggaatgtgacacacttttttgcaaatatcaattgccagctccacctgaaagctctagtatattatacaaagtgtttgctgtaaccagagatggccgaatcctggctgctggaggcaagtcaaatcatcttcatttgtggtgcttggaagctaggcagctctttagaattatccagatgcccactaaagt

SEQ ID NO: 2947 - DNA, 452 bp, Artificial
  cDNA Sequence
taagatgaaagtaacatcagggagagtacagcagccagcaaaatctagggaaagcaaaatgcaaactagaatattaaaacaagacctgactggtgattttgaaagtaaaaagaatgaattaccagatggattaaacaaaaagcgtttacaaatcttattaaaaggctatggtgaatatccaacaaaatacagaatgttcatttggcgctctctgctacaactgcctgaaaatcatactgcgtttagtaccctcatagataaggggactcatgtggcatttctcaaccttcagaagaaataccccatcaaaagtaggaagctactcagagtattacagagaaccttatctgcattagctcactggtctgtcatttttagtgacacaccatatcttccactcttggcatttccatttgtaaaattattccagaacaaccaactcatctgttttg

SEQ ID NO: 2948 - DNA, 689 bp, Artificial
  cDNA Sequence
tcatagtcaattggtgtcaacactggtttgaatattttcctaatcctcctatcaatattcttagcatgatagaaaatgttttggcatttcatgacaaggaactgctgcaacacttcatagatcatgatataacctcccagctatatgcatggcctcttcttgaaactgtgttctcagaagtgctgacaagagaggagtggctgaaattgttcgataatatcttttccaaccatccttccttccttctgatgactgttgtagcctacaacatatgttctagaacgcctctgctcagctgtaatcttaaagatgactttgagttttcttacagtttttttttcaccatcggaataacctggatataaatgttgtgattagacaagtttatcatctcatggagaccacgcctactgacattcatccagacagcatgcttaatgtttttgttgcactgacaaaagggcagtatccagtatttaatcaatatccaaagtttattgtggactatcaaacacaggaacgagaaagaataaggaatgatgaattggattacttaagagagaggcagacagttgaagatatgcaagctaaagtcgaccagcaaagagttgaagatgaagcttggtaccagaaacaggagctgcttcgtaaagctgaagaaacaagaagagaaatgctcttacaagagg

SEQ ID NO: 2949 - DNA, 1052 bp, Artificial
  cDNA Sequence
gctagctgctgtgaaaagagagctgaaagtaaaggaaatgcacttacaagatgctgcaagaaggcgttttctgaagcttcagcaagatcaacaggaaatggaactaagaagactggatgatgaaattgggagaaagaatcttactgaaaatcaagaagctcttgcaaaagaaatgcgagcagatgcagatgcctatagacgaaaagtggatcttgaagaacacatgtttcataagctgatagaagcaggtgaaacccagagccagaaaactcagaaggtgattaaagaaaatttggcaaaggctgaacaagcatgcctaaataccgactggcagattcagtctttacataaacaaaaatgtgatgatctacaacgaaacaaatgttaccaggaagtagccaaactccttagggaaaacagaaggaaagaaatagagataataaatgcaatggtggaggaggaagccaagaagtggaaggaagctgaaggaaaagagttccgtttgagatcagcaaagaaagcttctgctctttcagatgcgtctagaaagtggtttttaaagcaagagataaatgcggctgtagaacatgctgaaaatccatgtcataaagaagaacccaggttccaaaatgaacaggactcaagctgtttgcctagaacctcacaattaaatgactcttctgaaatggatccctcaacacagatttctttaaatagaagagcagtagaatgggacaccacgggacagaatcttattaagaaagtgagaaatcttcgccagagactcactgcccgggctcgtcacagatgtcaaacccctcatcttttggctgcatagaatgcatgtcaccttgagacggtcgagagagagacctattttgcaatcagtgacattgatttttagattatttatttaaaattcctataaagatcagccctttgtacagaaaaatgtgtctataaaaattatgtgttatttaattctgatactttttggcttgtaaatggcttcttgaactttttacaataaaaatgttttagaaactgttaaa

SEQ ID NO: 2950 - DNA, 918 bp, Artificial
  cDNA Sequence
agaatcttactgaaaatcaagaagctcttgcaaaagaaatgcgagcagatgcagatgcctatagacgaaaagtggatcttgaagaacacatgtttcataagctgatagaagcaggtgaaacccagagccagaaaactcagaaggtgattaaagaaaatttggcaaaggctgaacaagcatgcctaaataccgactggcagattcagtctttacataaacaaaaatgtgatgatctacaacgaaacaaatgttaccaggaagtagccaaactccttagggaaaacagaaggaaagaaatagagataataaatgcaatggtggaggaggaagccaagaagtggaaggaagctgaaggaaaagagttccgtttgagatcagcaaagaaagcttctgctctttcagatgcgtctagaaagtggtttttaaagcaagagataaatgcggctgtagaacatgctgaaaatccatgtcataaagaagaacccaggttccaaaatgaacaggactcaagctgtttgcctagaacctcacaattaaatgactcttctgaaatggatccctcaacacagatttctttaaatagaagagcagtagaatgggacaccacgggacagaatcttattaagaaagtgagaaatcttcgccagagactcactgcccgggctcgtcacagatgtcaaacccctcatcttttggctgcatagaatgcatgtcaccttgagacggtcgagagagagacctattttgcaatcagtgacattgatttttagattatttatttaaaattcctataaagatcagccctttgtacagaaaaatgtgtctataaaaattatgtgttatttaattctgatactttttggcttgtaaatggcttcttgaactttttacaataaaaatgttttagaaactgttaaa

SEQ ID NO: 2951 - DNA, 616 bp, Artificial
  cDNA Sequence
atagaagcaggtgaaacccagagccagaaaactcagaagtggaaggaagctgaaggaaaagagttccgtttgagatcagcaaagaaagcttctgctctttcagatgcgtctagaaagtggtttttaaagcaagagataaatgcggctgtagaacatgctgaaaatccatgtcataaagaacccaggttccaaaatgaacaggactcaagctgtttgcctagaacctcacaattaaatgactcttctgaaatggatccctcaacacagatttctttaaatagaagagcagtagaatgggacaccacgggacagaatcttattaagaaagtgagaaatcttcgccagagactcactgcccgggctcgtcacagatgtcaaacccctcatcttttggctgcatagaatgcatgtcaccttgagacggtcgagagagagacctattttgcaatcagtgacattgatttttagattatttatttaaaattcctataaagatcagccctttgtacagaaaaatgtgtctataaaaattatgtgttatttaattctgatactttttggcttgtaaatggcttcttgaactttttacaataaaaatgttttagaaactgttaaa

SEQ ID NO: 2952 - DNA, 2750 bp, Artificial
  cDNA Sequence
cttcttggaggtgccctgcacgccggtcctgggagcaggcggcctcccgggggtgcgggagccccactcctccgtggtgtgttccatttgcttcccacatctggaggagctgacgtgccagcctcccccagcaccacccagggacgggaggcatgagccggtcaaggcacctgggcaaaatccggaagcgtctggaagatgtcaagagccagtgggtccggccagccagggctgactttagtgacaacgagagtgcccggctggccacggacgccctcttggatgggggttctgaagcctactggcgggtgctcagccaggaaggcgaggtggacttcttgtcctcggtggaggcccagtacatccaggcccaggccagggagcccccgtgtcccccagacaccctgggaggggcggaagcaggccctaagggactggactccagctccctacagtccggcacctacttccctgtggcctcagagggcagcgagccggccctactgcacagctgggcctcagctgagaagccctacctgaaggaaaaatccagcgccactgtgtacttccagaccgtcaagcacaacaacatcagagacctcgtccgccgctgcatcacccggactagccaggtcctggtcatcctgatggatgtgttcacggatgtggagatcttctgtgacattctagaggcagccaacaagcgtggggtgttcgtttgtgtgctcctggaccagggaggtgtgaagctcttccaggagatgtgtgacaaagtccagatctctgacagtcacctcaagaacatttccatccggagtgtggaaggagagatatactgtgccaagtcaggcaggaaattcgctggccaaatccgggagaagttcatcatctcggactggagatttgtcctgtctggatcttacagcttcacctggctctgcggacacgtgcaccggaacatcctctccaagttcacaggccaggcggtggagctgtttgacgaggagttccgccacctctacgcctcctccaagcctgtgatgggcctgaagtccccgcggctggtcgcccccgtcccgcccggagcagccccggccaatggccgccttagcagcagcagtggctccgccagtgaccgcacgtcctccaaccccttcagcggccgctcggcaggcagccaccccggtacccgaagtgtgtccgcgtcttcagggccctgtagccccgcggccccacacccgcctccaccgccccggttccagccccaccaaggcccttggggagccccgagtccccaggcccacctctccccgcggccccacgacggcccgcccgccgctgtctacagcaacctgggggcctacaggcccacgcggctgcagctggagcagctgggcctggtgccgaggctgactccaacctggaggcccttcctgcaggcctcccctcacttctgaaggtcccatcccctgctgccctccgcaggcccagggctgggcactccctgagacccaaagacccacctcaacgacgagtggcgttgagccacttccctttgaaaagacactcaaaatcactgccatggttcaatgttcccaggccccaggccatccacttgccggcccccaccagttcttgggttccccgctctagtttgacctgtgcagcacattccagaaggttccagggaggttgtggggcagctagaggacaaaatcatgaaaacagagtccctgtcttccagagatcatccggggctttaatattaatggcccccaaaactccgtaagaagcaggaaatgcagcccaagttttacaaatgggtaaacagaggcactgagagatagatggtagtttggtacttctggttcccagtgcccaggaatggtccactcccaagaaattcaggaaagaaagactgaggagaaggtgtgggaacattctggatgtttcgggagagttggggaaactcctcctcttaggaaaggctaatactagggtatccttgggcccaatgaattaggggtgaggccccagaacccgttatctatgagttgtatgggggagccatctgaagctgtagccaccagggatgcagctagctgaggagtttggggtgttgggttggacaaggcaggttagtagactcagattcttgcttcaaagagccttgggctggcctggaggtccctggagtctagactggacctaggagcttgagttgtcaggggccaggactggccccactgcagtgcccaggccagtcttgagcagcagggagggctcagctgtccccagatccaggtgcctctgaccagcctggtcacctcctgaggaataaatgctgaacctcacaagccccatcattcatttcttctcaattcacagtgcccctctttgtttctggggtggaactaggtcctgagggcacagcctagctgagtgcaaagaaatataggatgcttagaaagcatacaggaggggccaggcgtggtggctcatgcctgtaatcccagaactttgggatgccaaggtggttggattacctgagatcaggtggattacctggtctcgagaccagcctgaccaatatggtgaaaccccgtctctactaaaaatacaaaaattaggctgagacaggagaattgcttgaacccaggaagcagaggttgcaatgagctgagattgcatcactgcactccagcatgggcaacaaagcaagactccgtcacagaaaaaaaaaaaaaaaa

SEQ ID NO: 2953 - DNA, 841 bp, Artificial
  cDNA Sequence
cttcttggaggtgccctgcacgccggtcctgggagcaggcggcctcccgggggtgcgggagccccactcctccgtggtgtgttccatttgcttcccacatctggaggagctgacgtgccagcctcccccagcaccacccagggacgggaggcatgagccggtcaaggcacctgggcaaaatccggaagcgtctggaagatgtcaagagccagtgggtccggccagccagggctgactttagtgacaacgagagtgcccggctggccacggacgccctcttggatgggggttctgaagcctactggcgggtgctcagccaggaaggcgaggtggacttcttgtcctcggtggaggcccagtacatccaggcccaggccagggagcccccgtgtcccccagacaccctgggaggggcggaagcaggccctaagggactggactccagctccctacagtccggcacctacttccctgtggcctcagagggcagcgagccggccctactgcacagctgggcctcagctgagaagccctacctgaaggaaaaatccagcgccactgtgtacttccagaccgtcaagcacaacaacatcagagacctcgtccgccgctgcatcacccggactagccaggtcctggtcatcctgatggatgtgttcacggatgtggagatcttctgtgacattctagaggcagccaacaagcgtggggtgttcgtttgtgtgctcctggaccagggaggtgtgaagctcttccaggagatgtgtgacaaagtccagatctctgacaaacatttccatccggagtgtggaaggagagatatactgtgccaagtcaggca

SEQ ID NO: 2954 - DNA, 1349 bp, Artificial
  cDNA Sequence
cctctccccccgggctccgcccaccccacgccgggaacccacgcgggccactacaagcccgccctttcctacgtctggtccagtcggtcttcctccggcccgggccctggcccagctagccggccatggaaggtaatggccccgctgctgtccactaccagccggccagccccccgcgggacgcctgcgtctacagcagctgctactgtgaagaaaatatttggaagctctgtgaatacatcaaaaaccatgaccagtatcctttagaagaatgttatgctgtcttcatatctaatgagaggaagatgatacctatctggaaacaacaggcgagacctggagatggacctgtgatctgggattaccatgttgttttgcttcatgtttcaagtggaggacagaacttcatttatgatctcgatactgtcttgccatttccctgcctctttgacacttatgtagaagatgcctttaagtctgatgatgacattcacccacagtttaggaggaaatttagagtgatccgtgcagattcatatttgaagaactttgcttctgaccgatctcacatgaaagactccagtgggaattggagagagcctccgccgccatatccctgcattgagactggagattccaaaatgaacctgaacgatttcatcagtatggatcccaaggtaggatggggcgccgtctacacactatccgaatttacacatcggtttggcagtaaaaactgctgaacttggtctcaagatgtggaactgtggagaaattctaggacatgaacaagctatcctttcatcgaggacagcaaacattatggtacagttggcttggaattatgtctttctcttttaatttgattgagtggaaatctgagtgaatacaaatataaatgaacaacataaaaacttttgttttgacatgtcaaattgaaacttgataaagtgcgtacttgctaagatattcctgtggctcatgcgttacaacacgaggacttaagccagtaatcgtttttgttcagatagaggtgtggaggtagagccagcccctcatgtctgttttggatgttttgtgtctctccagctacattgtaagttccttgagggcagggccatggcccattgctctgtgaatctcaaatgcccataaaaggtgcccataaaatgttttcttgaacatttgaatgtgctgttgtctggaaaggggtaatattgtgagctgaatcagcaataagtattagtctttttggactatggtattgttaaaaagactgcagccctctcagacttgagcgttaattggcttatttatttatggctttaaataaaatcgatttaacgtta

SEQ ID NO: 2955 - DNA, 1402 bp, Artificial
  cDNA Sequence
cactacaagcccgccctttcctacgtctggtccagtcggtcttcctccggcccgggccctggcccagctagccggccatggaaggtaatggccccgctgctgtccactaccagccggccagccccccgcgggacgcctgcgtctacagcagctgctactgtgaagaaaatatttggaagctctgtgaatacatcaaaaaccatgaccagtatcctttagaagaatgttatgctgtcttcatatctaatgagaggaagatgatacctatctggaaacaacaggcgagacctggagatggacctgtgatctgggctgacccccagaagcctcctttgttactagtttggagcagatccttgcagacgttttcctctgcattcacatgcatgcaaatgtacttctgaatgcgcacgattaccatgttgttttgcttcatgtttcaagtggaggacagaacttcatttatgatctcgatactgtcttgccatttccctgcctctttgacacttatgtagaagatgcctttaagtctgatgatgacattcacccacagtttaggaggaaatttagagtgatccgtgcagattcatatttgaagaactttgcttctgaccgatctcacatgaaagactccagtgggaattggagagagcctccgccgccatatccctgcattgagactggagattccaaaatgaacctgaacgatttcatcagtatggatcccaaggtaggatggggcgccgtctacacactatccgaatttacacatcggtttggcagtaaaaactgctgaacttggtctcaagatgtggaactgtggagaaattctaggacatgaacaagctatcctttcatcgaggacagcaaacattatggtacagttggcttggaattatgtctttctcttttaatttgattgagtggaaatctgagtgaatacaaatataaatgaacaacataaaaacttttgttttgacatgtcaaattgaaacttgataaagtgcgtacttgctaagatattcctgtggctcatgcgttacaacacgaggacttaagccagtaatcgtttttgttcagatagaggtgtggaggtagagccagcccctcatgtctgttttggatgttttgtgtctctccagctacattgtaagttccttgagggcagggccatggcccattgctctgtgaatctcaaatgcccataaaaggtgcccataaaatgttttcttgaacatttgaatgtgctgttgtctggaaaggggtaatattgtgagctgaatcagcaataagtattagtctttttggactatggtattgttaaaaagactgcagccctctcagacttgagcgttaattggcttatttatttatggctttaaataaaatcgatttaacgtta

SEQ ID NO: 2956 - DNA, 1224 bp, Artificial
  cDNA Sequence
actacaagcccgccctttcctacgtctggtccagtcggtcttcctccggcccgggccctggcccagctagccggccatggaagtgaagaaaatatttggaagctctgtgaatacatcaaaaaccatgaccagtatcctttagaagaatgttatgctgtcttcatatctaatgagaggaagatgatacctatctggaaacaacaggcgagacctggagatggacctgtgatctgggattaccatgttgttttgcttcatgtttcaagtggaggacagaacttcatttatgatctcgatactgtcttgccatttccctgcctctttgacacttatgtagaagatgcctttaagtctgatgatgacattcacccacagtttaggaggaaatttagagtgatccgtgcagattcatatttgaagaactttgcttctgaccgatctcacatgaaagactccagtgggaattggagagagcctccgccgccatatccctgcattgagactggagattccaaaatgaacctgaacgatttcatcagtatggatcccaaggtaggatggggcgccgtctacacactatccgaatttacacatcggtttggcagtaaaaactgctgaacttggtctcaagatgtggaactgtggagaaattctaggacatgaacaagctatcctttcatcgaggacagcaaacattatggtacagttggcttggaattatgtctttctcttttaatttgattgagtggaaatctgagtgaatacaaatataaatgaacaacataaaaacttttgttttgacatgtcaaattgaaacttgataaagtgcgtacttgctaagatattcctgtggctcatgcgttacaacacgaggacttaagccagtaatcgtttttgttcagatagaggtgtggaggtagagccagcccctcatgtctgttttggatgttttgtgtctctccagctacattgtaagttccttgagggcagggccatggcccattgctctgtgaatctcaaatgcccataaaaggtgcccataaaatgttttcttgaacatttgaatgtgctgttgtctggaaaggggtaatattgtgagctgaatcagcaataagtattagtctttttggactatggtattgttaaaaagactgcagccctctcagacttgagcgttaattggcttatttatttatggctttaaataaaatcgatttaacgtta

SEQ ID NO: 2957 - DNA, 1325 bp, Artificial
  cDNA Sequence
actacaagcccgccctttcctacgtctggtccagtcggtcttcctccggcccgggccctggcccagctagccggccatggaagtgaagaaaatatttggaagctctgtgaatacatcaaaaaccatgaccagtatcctttagaagaatgttatgctgtcttcatatctaatgagaggaagatgatacctatctggaaacaacaggcgagacctggagatggacctgtgatctgggctgacccccagaagcctcctttgttactagtttggagcagatccttgcagacgttttcctctgcattcacatgcatgcaaatgtacttctgaatgcgcacgattaccatgttgttttgcttcatgtttcaagtggaggacagaacttcatttatgatctcgatactgtcttgccatttccctgcctctttgacacttatgtagaagatgcctttaagtctgatgatgacattcacccacagtttaggaggaaatttagagtgatccgtgcagattcatatttgaagaactttgcttctgaccgatctcacatgaaagactccagtgggaattggagagagcctccgccgccatatccctgcattgagactggagattccaaaatgaacctgaacgatttcatcagtatggatcccaaggtaggatggggcgccgtctacacactatccgaatttacacatcggtttggcagtaaaaactgctgaacttggtctcaagatgtggaactgtggagaaattctaggacatgaacaagctatcctttcatcgaggacagcaaacattatggtacagttggcttggaattatgtctttctcttttaatttgattgagtggaaatctgagtgaatacaaatataaatgaacaacataaaaacttttgttttgacatgtcaaattgaaacttgataaagtgcgtacttgctaagatattcctgtggctcatgcgttacaacacgaggacttaagccagtaatcgtttttgttcagatagaggtgtggaggtagagccagcccctcatgtctgttttggatgttttgtgtctctccagctacattgtaagttccttgagggcagggccatggcccattgctctgtgaatctcaaatgcccataaaaggtgcccataaaatgttttcttgaacatttgaatgtgctgttgtctggaaaggggtaatattgtgagctgaatcagcaataagtattagtctttttggactatggtattgttaaaaagactgcagccctctcagacttgagcgttaattggcttatttatttatggctttaaataaaatcgatttaacgtta

SEQ ID NO: 2958 - DNA, 771 bp, Artificial
  cDNA Sequence
gagcacacaaatgttgcagagcttgcaaatgtccttgagattgacttatccctggttaagaatgctgtttcaatgtattgccgattgggctttgcccataagaagggacaagtaattaatttggatcaacttcattcatcatggaagaatgttccatccgtaaacagattaaagagtaccttagatccacagaagatgctcttgtcatgggatggaggggaaagtaggagtcctgtacaagaagcttcatcggcaactgacactgatacaaatagtcaagaagatccagctgacacagccagtgtaagcagcctgagtctgtctacaggacacacgaagcgcatcgcattcctgtttgactccactcttactgccttcttaatgatgggaaatctttcaccaaacttgaaaagtcatgcagtcacaatgtttgaagtaggcaaactctcagatgagtctctggacagctttcttatagaactagaaaaggttcagagcactggtgaaggagaagcacagagatattttgatcatgcacttactctgagaaacacaatactgtttctgcgtcataacaaagatctagttgcgcaaactgcacagccagaccaacccaattatggttttcctctggatctcttacgctgtgaaagccttcttggtttggaccctgcaacttgcagcagagttctaaacaaaaattacacgctgcttgtttccatggctcccctcaccaatgaaatccggcctgtcagcagctgcacccctcag

SEQ ID NO: 2959 - DNA, 1082 bp, Artificial
  cDNA Sequence
gtttgtataacaaaggatttatttatctggatgtaccaatatctgatgacagttgtatagcagttccacctcttgaaggttttgtaatgaatcgagtgcaaggtgattattttgaaactctactctataagatatttgtttcaatagatgagcacacaaatgttgcagagcttgcaaatgtccttgagattgacttatccctggttaagaatgctgtttcaatgtattgccgattgggctttgcccataagaagggacaagtaattaatttggatcaacttcattcatcatggaagaatgttccatccgtaaacagattaaaaggtggggtttcaccatgttagccaggctggtgtcgaactcctggccccaactgatccacccaccttggccttccaaagtgttgggattgcaggtgtgagccactgcacctggcccagaaattttatttattcaacctgtcagttgaggtgagccctttatattataccttagatccacagaagatgctcttgtcatgggatggaggggaaagtaggagtcctgtacaagaagcttcatcggcaactgacactgatacaaatagtcaagaagatccagctgacacagccagtgtaagcagcctgagtctgtctacaggacacacgaagcgcatcgcattcctgtttgactccactcttactgccttcttaatgatgggaaatctttcaccaaacttgaaaagtcatgcagtcacaatgtttgaagtaggcaaactctcagatgagtctctggacagctttcttatagaactagaaaaggttcagagcactggtgaaggagaagcacagagatattttgatcatgcacttactctgagaaacacaatactgtttctgcgtcataacaaagatctagttgcgcaaactgcacagccagaccaacccaattatggttttcctctggatctcttacgctgtgaaagccttcttggtttggaccctgcaacttgcagcagagttctaaacaaaaattacacgctgcttgtttccatggctcccctcaccaatgaaatccggcctgtcagcagctgcacccctcag

SEQ ID NO: 2960 - DNA, 577 bp, Artificial
  cDNA Sequence
agaacctgatttggcttctggctcagatgtaaatgggagtacagagtcatttgaaatggtcattgaggaagcaactatagattcagcaacaaagcaaacctctggtgccacaacagaagcagattgggttcctctcgagctgtgctttggaattccactgttcagttccgaattaaaccggaaagtttgtaggaaaattgctgcacatggcctttgcagaaaagagagccttcaaaacctcttacattccagtagaaaactctctctgcaagtccttaactttgttcactcattccaggtaacaaaaaccaaaaagtccaaatggtacttgtactgagctttaagtatgcacaacacttctgtgtttgtttttgagtcaccacagcagcaagatatgaaataaacattaattttattgtacaaatgaagacattgagattcaagaagttaatggacttgcacatttcactcgccaggtcttcggagaccaaagcttgatctctttgttctgtgccagtgctttattcaacagaaatgtgttaagtgtcttttatgggctgtgtgccatgctaggtgt

SEQ ID NO: 2961 - DNA, 676 bp, Artificial
  cDNA Sequence
cctgtaggaggactgatctcttgatgaaatacagaaaaaccatctcagaaaaaggaaaatgggcaatcgtcatagccagtcgtacaccctctcagaaggcagtcaacagttgcctaaaggggactcccaaccctcgacagtcgtgcagcctctcagccacccatcacggaatggagagccagaggccccacagcctgctaaagcgagcagtcctcagggttttgatgtggatcgagatgccaaaaagctgaacaaagcctgcaaaggaatggggaccaatgaagcagccatcattgaaatcttatcgggcaggacatcagatgagaggcaacaaatcaagcaaaagtacaaggcaacgtacggcaaggagctggaggaagtactcaagagtgagctgagtggaaacttcgagaagacagcgttggcccttctggaccgtcccagcgagtacgccgcccggcagctgcagaaggctatgaagggtctgggcacagatgagtccgtcctcattgaggtcctgtgcacgaggaccaataaggaaatcatcgccattaaagaggcctaccaaaggctatttgataggagcctcgaatcagatgtcaaaggtgatacaagtggaaacctaaaaaaaatcctggtgtctctgctgcaggctaatcgcaatgaaggagatgac

SEQ ID NO: 2962 - DNA, 533 bp, Artificial
  cDNA Sequence
ggaggactgatctcttgatgaaatacagaaaaaccatctcagaaaaaggaaaatgggcaatcgtcatagccagtcgtacaccctctcagaaggcagtcaacagttgcctaaaggggactcccaaccctcgacagtcgtgcagcctctcagccacccatcacggaatggagagccagaggccccacagcctgctaaagcgagcagtcctcagggttttgatgtggatcgagatgccaaaaagctgaacaaagcctgcaaaggaatggggaccaatgaagcagccatcattgaaatcttatcgggcaggacatcagatgagaggcaacaaatcaagcaaaagtacaaggcaacgtacggcaaggagctggaggaagtactcaagagtgagctgagtggaaacttcgagaagacagcgttggcccttctggaccgtcccagcgagtacgccgcccggcagctgcagaaggctatgaagggtctgggcacagatgagtccgtcctcattgaggtcctgtgcacgaggaccaataagg

SEQ ID NO: 2963 - DNA, 690 bp, Artificial
  cDNA Sequence
ggcaaagacatagaagaagccattgaagaagaaacatcaggcgacttgcagaaggcctatttaactctcgtgagatgtgcccaggattgtgaggactattttgctgaacgtctgtacaagtcgatgaagggtgcggggaccgatgaggagacgttgattcgcatagtcgtgaccagggccgaggtggaccttcaggggatcaaagcaaagttccaagagaagtatcagaagtctctctctgacatggttcgctcagatacctccggggacttccggaaactgctagtagccctcttgcactgagccaagccagggcaataggaacacagggtggaaccgcctttgtcaagagcacattccaaatcaaacttgcaaatgagactcccgcacgaaaacccttaagagtcccggattactttcttggcagcttaagtggcgcagccaggccaagctgtgtaagttaagggcagtaacgttaagatgcgtgggcagggcaccttgaactctggcttagcaagcatctaggctgcctcttcactttcttttagcatggtaactggatgttttctaaacactaatgaaatcagcagttgatgaaaaaactatgcatttgtaatggcacatttagaaggatatgcatcacacaagtaaggtacaggaaagacaaaattaaacaatttattaattttc

SEQ ID NO: 2964 - DNA, 1457 bp, Artificial
  cDNA Sequence
agcactcccggagcctgcaacgcttgagatcctctccgcgcccgccaccccgcagggtgccccgcgccgttcccgccgccccgccgcccccgtcgcgggcccctgcaccccgagcatccgccccgggtggcacgtccccgagcccaccaggccggccccgtctccccatccgtctagtccgctcgcggtgccatgccattcctcgggcaggactggcggtcccccgggcagaactgggtgaagacggccgacggctggaagcgcttcctggatgagaagagcggcagtttcgtgagcgacctcagcagttactgcaacaaggaggtatacaataaggagaatcttttcaacagcctgaactatgatgttgcagccaagaagagaaagaaggacatgctgaatagcaaaaccaaaactcagtatttccaccaagaaaaatggatctatgttcacaaaggaagtactaaagagcgccatggatattgcaccctgggggaagctttcaacagactggacttctcaactgccattctggattccagaagatttaactacgtggtccggctgttggagctgatagcaaagtcacagctcacatccctgagtggcatcgcccaaaagaacttcatgaatattttggaaaaagtggtactgaaagtccttgaagaccagcaaaacattagactaataagggaactactccagaccctctacacatccttatgtacactggtccaaagagtcggcaagtctgtgctggtcgggaacattaacatgtgggtgtatcggatggagacgattctccactggcagcagcagctgaacaacattcagatcaccaggcctgccttcaaaggcctcaccttcactgacctgcctttgtgcctacaactgaacatcatgcagaggctgagcgacgggcgggacctggtcagcctgggccaggctgcccccgacctgcacgtgctcagcgaagaccggctgctgtggaagaaactctgccagtaccacttctccgagcggcagatccgcaaacgattaattctgtcagacaaagggcagctggattggaagaagatgtatttcaaacttgtccgatgttacccaaggaaagagcagtatggagatacccttcagctctgcaaacactgtcacatcctttcctggaagggcactgaccatccgtgcactgccaataacccagagagctgctccgtttcactttcaccccaggactttatcaacttgttcaagttctgaatcccagcacatgacaacacttcagaagggtccccctgctgactggagagctgggaatatggcatttggacacttcatttgtaaatagtgtacattttaaacattggctcgaaacttcagagataagtcatggagaggacattggaggggagaaatgcagttgctgactgggaatttaagaatgtgaacttctcact

SEQ ID NO: 2965 - DNA, 634 bp, Artificial
  cDNA Sequence
agcactcccggagcctgcaacgcttgagatcctctccgcgcccgccaccccgcagggtgccccgcgccgttcccgccgccccgccgcccccgtcgcgggcccctgcaccccgagcatccgccccgggtggcacgtccccgagcccaccaggccggccccgtctccccatccgtctagtccgctcgcggtgccatgccattcctcgggcaggactggcggtcccccgggcagaactgggtgaagacggccgacggctggaagcgcttcctggatgagaagagcggcagtttcgtgagcgacctcagcagttactgcaacaaggaggtatacaataaggagaatcttttcaacagcctgaactatgatgttgcagccaagaagagaaagaaggacatgctgaatagcaaaaccaaaactcagtatttccaccaagaaaaatggatctatgttcacaaaggaagtactaaagagcgccatggatattgcaccctgggggaagctttcaacagactggacttctcaactgccattctggattccagaagatttaactacgtggtccgggtaacaaagtcacagctcacatccctgagtggcatcgcccaaaagaacttcatgaatattttggaaaaag

SEQ ID NO: 2966 - DNA, 1141 bp, Artificial
  cDNA Sequence
gtgggtacaggaaagaagccagtgccccaggtcacctaagacaggcatcaagctcattcggcaaaatccagttgggttgttctaactggctcattcttacttgggtgacctctgcatggcaggagtaacttctgtgcctttgttttcatgttcagcgccatggatattgcaccctgggggaagctttcaacagactggacttctcaactgccattctggattccagaagatttaactacgtggtccggctgttggagctgatagcaaagtcacagctcacatccctgagtggcatcgcccaaaagaacttcatgaatattttggaaaaagtggtactgaaagtccttgaagaccagcaaaacattagactaataagggaactactccagaccctctacacatccttatgtacactggtccaaagagtcggcaagtctgtgctggtcgggaacattaacatgtgggtgtatcggatggagacgattctccactggcagcagcagctgaacaacattcagatcaccaggcctgccttcaaaggcctcaccttcactgacctgcctttgtgcctacaactgaacatcatgcagaggctgagcgacgggcgggacctggtcagcctgggccaggctgcccccgacctgcacgtgctcagcgaagaccggctgctgtggaagaaactctgccagtaccacttctccgagcggcagatccgcaaacgattaattctgtcagacaaagggcagctggattggaagaagatgtatttcaaacttgtccgatgttacccaaggaaagagcagtatggagatacccttcagctctgcaaacactgtcacatcctttcctggaagggcactgaccatccgtgcactgccaataacccagagagctgctccgtttcactttcaccccaggactttatcaacttgttcaagttctgaatcccagcacatgacaacacttcagaagggtccccctgctgactggagagctgggaatatggcatttggacacttcatttgtaaatagtgtacattttaaacattggctcgaaacttcagagataagtcatggagaggacattggaggggagaaatgcagttgctgactgggaatttaagaatgtgaacttctcact

SEQ ID NO: 2967 - DNA, 1076 bp, Artificial
  cDNA Sequence
attggagcaagccttgccgatgttgatccaatgcaactagattcttcagtacgatttgatagtgttggtggcctgtctaatcatatagcagctctaaaagagatggtggtgtttccattactttatccagaagtctttgaaaaatttaaaattcaacccccaagaggttgtttgttttatgggccacctggaactggaaagactctggttgccagagcacttgccaatgagtgcagtcaaggggataaaagagtagcatttttcatgaggaaaggtgctgattgtctaagtaaatgggtaggagaatctgaaagacagctacgattgctgtttgatcaggcctatcagatgcgcccatcaattattttttttgacgaaattgatggtctggctccagtacggtcaagcaggcaagatcagattcacagttctattgtttccaccctgctagctcttatggatggattggacagcagaggggaaattgtggtcattggtgctacgaacaggctagattctatagatcctgctttacgaaggcctggtcgctttgatagagaattcctctttagcctgcctgataaagaggctcgaaaagagattctaaagattcacaccagggattggaatcccaaaccactggacacatttttagaagagctagcagaaaactgtgttggatactgtggagcagatattaaatcaatatgtgctgaagctgctttatgtgctttacgacgacgctacccacagatctataccactagtgagaaactgcagttggatctctcttcaattaatatctcagctaaggatttcgaggtagctatgcaaaagatgataccagcctcccaaagagctgtgacatcacctgggcaggcactgtccaccgttgtgaaaccactcctgcaaaacactgttgacaagattttagaagccctgcagagagtatttccacatgcagaattcagaacaaataaaacattagactcagatatttcttgtcctctgctagaaagtgacttggcttacagtgatgatgatgttccatcagtttatgaaaatggactttctca

SEQ ID NO: 2968 - DNA, 1496 bp, Artificial
  cDNA Sequence
ggagaaccaggatttgggcaaggttctcacttggcaccagctgtcattcatgctttggaaaagtttactgtatatacattagacattcctgttctttttggagttagtactacatcccctgaagaaacatgtgcccaggtgattcgtgaagctaagagaacagcaccaagtatagtgtatgttcctcatatccacgtgtggtgggaaatagttggaccgacacttaaagccacatttaccacattattacagaatattccttcatttgctccagttttactacttgcaacttctgacaaaccccattccgctttgccagaagaggtgcaagaattgtttatccgtgattatggagagatttttaatgtccagttaccggataaagaagaacggacaaaattttttgaagatttaattctaaaacaagctgctaagcctcctatatcaaaaaagaaagcagttttgcaggctttggaggtactcccagtagcaccaccacctgagccaagatcactgacagcagaagaagtgaaacgactagaagaacaagaagaagatacatttagagaactgaggattttcttaagaaatgttacacataggcttgctattgacaagcgattccgagtgtttactaagcctgttgaccctgatgaggttcctgattatgtcactgtaataaagcaaccaatggacctttcatctgtaatcagtaaaattgatctacacaagtatctgactgtgaaagactatttgagagatattgatctaatctgtagtaatgccttagaatacaatccagatagagatcctggagatcgtcttattaggcatagagcctgtgctttaagagatactgcctatgccataattaaagaagaacttgatgaagactttgagcagctctgtgaagaaattcaggaatctagaaagaaaagaggttgtagctcctccaaatatgccccgtcttactaccatgtgatgccaaagcaaaattccactcttgttggtgataaaagatcagacccagagcagaatgaaaagctaaagacaccgagtactcctgtggcttgcagcactcctgctcagttgaagaggaaaattcgcaaaaagtcaaactggtacttaggcaccataaaaaagcgaaggaagatttcacaggcaaaggatgatagccagaatgccatagatcacaaaattgagagtgatacagaggaaactcaagacacaagtgtagatcataatgagaccggaaacacaggagagtcttcggtggaagaaaatgaaaaacagcaaaatgcctctgaaagcaaactggaattgagaaataattcaaatacttgtaatatagagaatgagcttgaagactctaggaagactacagcatgtacagaattgagagacaagattgcttgtaatggagatgcttctagctctcagataatacatatttctgatgaaaatgaaggaaaagaaatgtgtgttctgcgaatgac

SEQ ID NO: 2969 - DNA, 624 bp, Artificial
  cDNA Sequence
gtgaagctaagagaacagcaccaagtatagtgtatgttcctcatatccacgtgtggtgggaaatagttggaccgacacttaaagccacatttaccacattattacagaatattccttcatttgctccagttttactacttgcaacttctgacaaaccccattccgctttgccagaagaggtgcaagaattgtttatccgtgattatggagagatttttaatgtccagttaccggataaagaagaacggacaaaattttttgaagatttaattctaaaacaagctgctaagcctcctatatcaaaaaagaaagcagttttgcaggctttggaggtactcccagtagcaccaccacctgagccaagatcactgacagcagaagaagtgaaacgactagaagaacaagaagaagatacatttagagaactgaggattttcttaagaaatgttacacataggcttgctattgacaagcgattccgagtgtttactaagcctgttgaccctgatgaggttcctgattatgtcactgtaataaagcaaccaatggacctttcatctgtaatcaatattgatctaatctgtagtaatgccttagaatacaatccagatagagatcctggag

SEQ ID NO: 2970 - DNA, 487 bp, Artificial
  cDNA Sequence
gaatgctaaggaagctgtggcaactgcctaaaacgttgaaggagaatcaattcttcaactcaagatgtctgatttactgtgaatttgcccaatctttgatgacattgaaaacgttttggggcatacacactcaaaaagcaggatccaatacccaaaagaaatggaacttaatgttgtgccaaagttaaactactgcagttggtggaagttctgcaatgtaaatagaacactaattaaaaaacaacttgtaaaaatgcaatttaaattttaatacagtacatttttcttctaatatgatggagacattctgaatcttagactttctgagggggtttaatgaccactagagcttgtcctcatattcagtccagtttaatactgtatgtctagtaagatgggctatatattgcctctattctttgagatgtgattaagcttagaactttgaccaaaaattttacagtaaaaattgttagaaatgggtaaa

SEQ ID NO: 2971 - DNA, 605 bp, Artificial
  cDNA Sequence
gcagccggtttgaaatgcaagatggcggcggcgtggcgctgagaggcgcggcggcccctgcaggagaagacagactgctgctttggacctgttggtaatgatggcctgagctaaacatctaactagaagggatacccttccatttcaaagaacagaatgctaaggaagctgtggcaagtgattggagttgtgcttcaaaaatttcagaaattcagcagtattttatctgccaacaataagctctttacttgattgcaccatgagaaagctgctaatgagacttgttgagcacaaaaatggacttgaagaaccaaaagccattgttttcaaatgaagaacactgaacagttttaagcctcgatgctttttaatcaccactgagcttttcctcataacatcagaatggcaagcaggcgaaaatcaacaacaccttgcatggtccttgccagtgaacaagatccagaccttgagttgatatcagatttggatgaaggtcctcctgtgcttacacctgtagaaaacaccagagcagagagtatctcaagtgatgaagaggttcatgaatctgtggattcagacaatcagcaaaataaaaaagttgaagg

SEQ ID NO: 2972 - DNA, 724 bp, Artificial
  cDNA Sequence
cggcggcgtggcgctgagaggcgcggcggcccctgcaggtagtggcgcgagccggctccgcgaccagcgggcccggagactctgggctgcgggtgggaactggagcgcagagtccgcggccggcacgggaaaggcgaaagacagactgctgctttggacctgttggtaatgatggcctgagctaaacatctaactagaagggatacccttccatttcaaagaacagaatgctaaggaagctgtggcaagtgattggagttgtgcttcaaaaatttcagaaattcagcagtattttatctgccaacaataagctctttacttgattgcaccatgagaaagctgctaatgagacttgttgagcacaaaaatggacttgaagaaccaaaagccattgttttcaaatgaagaacactgaacagttttaagcctcgatgctttttaatcaccactgagcttttcctcataacatcagaatggcaagcaggcgaaaatcaacaacaccttgcatggtccttgccagtgaacaagatccagaccttgagttgatatcagatttggatgaaggtcctcctgtgcttacacctgtagaaaacaccagagcagagagtatctcaagtgatgaagaggttcatgaatctgtggattcagacaatcagcaaaataaaaaagttgaaggtggatatgaatgtaaatattgtacttttcaaactccagatctaaatat

SEQ ID NO: 2973 - DNA, 1305 bp, Artificial
  cDNA Sequence
ctcgttgcccccgccgcgggcgcgagatggattccgggtgctggttgttcggcggcgagttcgaggactcggtgttcgaggagaggccggagcggcggtcaggaccgcccgcgtcctactgcgccaagctctgcgagccgcagtggttttatgaagaaacagaaagcagtgatgatgttgaagtgctgactctcaagaaattcaaaggagacctggcctacagacgacaagagtatcagaaagcactgcaggagtattccagtatctctgaaaaattgtcatcaaccaattttgccatgaaaagggatgtccaggaaggtcaggctcggtgtctggctcacctgggtaggcatatggaggcgctggagattgctgcaaacttggaaaataaagcaaccaacacagaccatttaaccacggtactctacctccagcttgctatttgttcaagtttgcagaacttggagaaaacaattttctgcctgcagaaactgatttctttgcatccttttaatccttggaactggggcaaattggcagaggcttacctgaatctggggccagctctttcagcagcacttgcgtcatctcagaaacagcacagtttcacctcaagtgacaaaactatcaaatccttctttccacactcaggaaaagactgtcttttgtgttttcctgaaaccttgcctgagagctctttattttctgtggaagcgaatagcagtaatagccagaaaaatgagaaagctctgacaaatatccaaaactgtatggcagaaaagagagaaacagtgttgatagagactcagctgaaagcatgtgcctcttttatacgaaccaggcttctgcttcagtttacccaacctcagcaaacatcgtttgctttggagaggaacttaaggactcagcaggaaattgaagataaaatgaaagggttcagcttcaaagaagacactttgctgttgatagctgaggttatgggagaagatatcccagaaaaaataaaagatgaagttcacccagaggtgaagtgtgttggctccgtagccctgactgccttggtgactgtatcctcagaagaatttgaagacaagtggttcagaaagatcaaagaccatttctgtccatttgaaaatcagttccatacagagatacaaatcttggcttagtgggttataaaaaacaaaaccacaaatatcttgtactgtattaattgtccttgtttacttcagacaggatccattgctaatcatggagtataaatgattatttatgttttataaaactggcttctgtctcaaatga

SEQ ID NO: 2974 - DNA, 593 bp, Artificial
  cDNA Sequence
gaggactcggtgttcgaggagaggccggagcggcggtcaggaccgcccgcgtcctactgcgccaagctctgcgagccgcagtggttttatgaagaaacagaaagcagtgatgatgttgaagtgctgactctcaagaaattcaaaggagacctggcctacagacgacaagagtatcagaaagcactgcaggagtattccagtatctctgaaaaattgtcatcaaccaattttgccatgaaaagggatgtccaggaaggtcaggctcggtgtctggctcacctgggtaggcatatggaggcgctggagattgctgcaaacttggaaaataaagcaaccaacacagaccatttaaccacggcttctgcttcagtttacccaacctcagcaaacatcgtttgctttggagaggaacttaaggactcagcaggaaattgaagataaaatgaaagggttcagcttcaaagaagacactttgctgttgatagctgaggttatgggagaagatatcccagaaaaaataaaagatgaagttcacccagaggtgaagtgtgttggctccgtagccctgactgccttggtgactgtatcctcag

SEQ ID NO: 2975 - DNA, 494 bp, Artificial
  cDNA Sequence
gaggactcggtgttcgaggagaggccggagcggcggtcaggaccgcccgcgtcctactgcgccaagctctgcgagccgcagtggttttatgaagaaacagaaagcagtgatgatgttgaagtgctgactctcaagaaattcaaaggagacctggcctacagacgacaagagtatcagaaagcactgcaggagtattccagtatctctgaaaaattgtcatcaaccaattttgccatgaaaagggatgtccaggaaggtcaggctcggtgtctggctcacctgggtaggcatatggaggcgctggagattgctgcaaacttggaaaataaagcaaccaacacagaccatttaaccacggcttctgcttcagtttacccaacctcagcaaacatcgtttgctttggagaggaacttaaggactcagcaggaaattgaagataaaatgaaagggttcagcttcaaagaagacactttgctgttgatagctgaggtga

SEQ ID NO: 2976 - DNA, 717 bp, Artificial
  cDNA Sequence
gagatccagagccatgtcagggactcctactcacagatgcagtctcaagctggtggaaacaatactggttcaactccactaagaaaagcccaatcttcagctcccaaagttaggaaaagtgtcagtagtcgaatccatgaagccgtgaaagccatcgtgctgtgtcacaacgtgacccccgtgtatgagtctcgggccggcgttactgaggagactgagttcgcagaggctgaccaagacttcagtgatgagaatcgcacctaccaggcttccagcccggatgaggtcgctctggtgcagtggacagagagtgtgggcctcacgctggtcagcagggacctcacctccatgcagctgaagacccccagtggccaggtcctcagcttctgcattctgcagctgtttcccttcacctccgagagcaagcggatgggcgtcatcgtcagggatgaatccacggcagaaatcacattctacatgaagggcgctgacgtggccatgtctcctatcgtgcagtataatgactggctggaagaggagaggtcactattccaattcctaaacaggagacgggaagagacacagctgttggatgcataaagaagggtgctagacccacgcctctcctccagcccttcctgccatccctgcagcctccagtccaacgtcaaatacaatcaactggatgaattaaaaagaaattgcaaataatatgaa

SEQ ID NO: 2977 - DNA, 687 bp, Artificial
  cDNA Sequence
gagatccagagccatgtcagggactcctactcacagatgcagtctcaagctggtggaaacaatactggttcaactccactaagaaaagcccaatcttcagctcccaaagttaggaaaagtgtcagtagtcgaatccatgaagccgtgaaagccatcgtgctgtgtcacaacgtgacccccgtgtatgagtctcgggccggcgttactgaggagactgagttcgcagaggctgaccaagacttcagtgatgagaatcgcacctaccaggcttccagcccggatgaggtcgctctggtgcagtggacagagagtgtgggcctcacgctggtcagcagggacctcacctccatgcagctgaagacccccagtggccaggtcctcagcttctgcattctgcagctgtttcccttcacctccgagagcaagcggatgggcgtcatcgtcagggatgaatccacggcagaaatcacattctacatgaagggcgctgacgtggccatgtctcctatcgtgcagtataatgactggctggaagaggaggagacgggaagagacacagctgttggatgcataaagaagggtgctagacccacgcctctcctccagcccttcctgccatccctgcagcctccagtccaacgtcaaatacaatcaactggatgaattaaaaagaaattgcaaataata

SEQ ID NO: 2978 - DNA, 2120 bp, Artificial
  cDNA Sequence
agtgcggaaacatggctcgcgaaggactgcggaccctcgtggttgcaaagaaggcgttgacagaggagcagtaccaggactttgaggtccctcaaggtggccgcggtagtcgagagcctggagagggagatggaactgctgtgcctcaccggcgtggaggaccagctgcaggcagacgtgcggcccacgctggagatgctgcgcaacgccgggatcaagatatggatgctaacaggcgataaactcgagacagctacctgcattgccaaaagttcacatctcgtgtctagaacacaagatattcatattttcagacaggtaaccagtcggggagaggcacatttggagctgaatgcatttcgaaggaagcatgattgtgcactagtcatatctggggactctctggaggtttgtctaaagtactacgagcatgaatttgtggagctggcctgccagtgccctgccgtggtttgctgccgctgctcacccacccagaaggcccgcattgtgacactgctgcagcagcacacagggagacgcacctgcgccatcggtgatggaggaaatgatgtcagcatgattcaggcagcagactgtgggattgggattgagggaaaggagggtaaacaggcctcgctggcggccgacttctccatcacgcagttccggcacataggcaggctgctcatggtgcacgggcggaacagctacaagaggtcggcggcactcggccagttcgtcatgcacaggggccttatcatctccaccatgcaggctgtgttttcctcagtcttctacttcgcatccgtccctttgtatcagggcttcctcatggtggggtatgccaccatatacaccatgttcccagtgttctccttagtgctggaccaggacgtgaagccagagatggcgatgctctacccggagctgtacaaggacctcaccaagggaagatccttgtccttcaaaaccttcctcatctgggttttaataagtatttaccaaggcggcatcctcatgtatggggccctggtgctcttcgagtctgagttcgtccacgtggtggccatctccttcaccgcactgatcctgaccgagctgctgatggtggcgctgaccgtccgcacgtggcactggctgatggtggtggccgagttcctcagcttaggctgctacgtgtcctcactcgcttttctcaatgaatattttgatgttgcctttatcaccaccgtgaccttcctgtggaaagtgtcggcgatcaccgtggtcagctgcctcccgctgtatgtcctcaagtacctgaggcgcaagctctctcctcccagctactgcaagctggcctcctaaggggctgtgcacccccagcgggctggccccagcaccttctgcccttcccagcaccttgtgcccttgccagtgaacgcagggtttgccattgctaccaagcaagcaccacaagaaagggagggtacgccaggcgagcccagggcacagatgctgagacagcctctccttctcagtgcagggacgtcacccctgccaggcaagcccagggcacagatgccaggatggcttctccctctcagtgcgaggcttcacccctgccaggcaagcccagggcatagatgctgagacagcctctccctctcagtgcagggacgtcacccctgccaggcaagcccagggcacagaggccgggacggcctctccctctcagtgtgaggcttcacccatgctaggcaagcccagggcacagatgccgggatggcccctccctctcagtgcgggaacgtcacccctgccaggcaagcccagggcacagatgctgcgatggcctcttcctcttaagtgtggggcctcacccctgcttttctttctttttttgtattgtcaaaattgtatttccatattgaagcagcttgagtttctactgaaaatgagcccgaattatttcactattactgtaaagggttcatcttactctggcattctgagaattagactgaaagtttaatttctgcagttccctcatattcagattctttctttgatgttataacacaaagtcattcctactcaaatgtaataaaattgaggctccacggaggcccgtgtccaca

SEQ ID NO: 2979 - DNA, 427 bp, Artificial
  cDNA Sequence
gctcctttggttttagataataaccccagaacattccactgtgactctgcaaataatgccctgtttctctgtgcctgtaacttagacaacattttaatttgggattctttttctcccttaatggaggtaaccagtcggggagaggcacatttggagctgaatgcatttcgaaggaagcatgattgtgcactagtcatatctggggactctctggaggtttgtctaaagtactacgagcatgaatttgtggagctggcctgccagtgccctgccgtggtttgctgccgctgctcacccacccagaaggcccgcattgtgacactgctgcagcagcacacagggagacgcacctgcgccatcggtgatggaggaaatgatgtcagcatgattcaggcagcagactgtgggattgggattgagggaaagg

SEQ ID NO: 2980 - DNA, 1881 bp, Artificial
  cDNA Sequence
tgcaaataatgccctgtttctctgtgcctgtaacttagacaacattttaatttgggattctttttctcccttaatggaggtaaccagtcggggagaggcacatttggagctgaatgcatttcgaaggaagcatgattgtgcactagtcatatctggggactctctggaggtttgtctaaagtactacgagcatgaatttgtggagctggcctgccagtgccctgccgtggtttgctgccgctgctcacccacccagaaggcccgcattgtgacactgctgcagcagcacacagggagacgcacctgcgccatcggtgatggaggaaatgatgtcagcatgattcaggcagcagactgtgggattgggattgagggaaaggagggtaaacaggcctcgctggcggccgacttctccatcacgcagttccggcacataggcaggctgctcatggtgcacgggcggaacagctacaagaggtcggcggcactcggccagttcgtcatgcacaggggccttatcatctccaccatgcaggctgtgttttcctcagtcttctacttcgcatccgtccctttgtatcagggcttcctcatggtggggtatgccaccatatacaccatgttcccagtgttctccttagtgctggaccaggacgtgaagccagagatggcgatgctctacccggagctgtacaaggacctcaccaagggaagatccttgtccttcaaaaccttcctcatctgggttttaataagtatttaccaaggcggcatcctcatgtatggggccctggtgctcttcgagtctgagttcgtccacgtggtggccatctccttcaccgcactgatcctgaccgagctgctgatggtggcgctgaccgtccgcacgtggcactggctgatggtggtggccgagttcctcagcttaggctgctacgtgtcctcactcgcttttctcaatgaatattttgatgttgcctttatcaccaccgtgaccttcctgtggaaagtgtcggcgatcaccgtggtcagctgcctcccgctgtatgtcctcaagtacctgaggcgcaagctctctcctcccagctactgcaagctggcctcctaaggggctgtgcacccccagcgggctggccccagcaccttctgcccttcccagcaccttgtgcccttgccagtgaacgcagggtttgccattgctaccaagcaagcaccacaagaaagggagggtacgccaggcgagcccagggcacagatgctgagacagcctctccttctcagtgcagggacgtcacccctgccaggcaagcccagggcacagatgccaggatggcttctccctctcagtgcgaggcttcacccctgccaggcaagcccagggcatagatgctgagacagcctctccctctcagtgcagggacgtcacccctgccaggcaagcccagggcacagaggccgggacggcctctccctctcagtgtgaggcttcacccatgctaggcaagcccagggcacagatgccgggatggcccctccctctcagtgcgggaacgtcacccctgccaggcaagcccagggcacagatgctgcgatggcctcttcctcttaagtgtggggcctcacccctgcttttctttctttttttgtattgtcaaaattgtatttccatattgaagcagcttgagtttctactgaaaatgagcccgaattatttcactattactgtaaagggttcatcttactctggcattctgagaattagactgaaagtttaatttctgcagttccctcatattcagattctttctttgatgttataacacaaagtcattcctactcaaatgtaataaaattgaggctccacggaggcccgtgtccaca

SEQ ID NO: 2981 - DNA, 871 bp, Artificial
  cDNA Sequence
gcggctgcggtcttcgggagaggagaaactttggggcccgcgccgcgcgccggcggcaccatgaagtcagcggaggaagaacactatggctatgcatcctccaacgtcagccccgccctgccgctccccacggcgcactccaccctgccggccccgtgccacaaccttcagacctccacaccgggcatcatcccgccggcggatcacccctcggggtacggagcagctttggacggtgggcccgcgggctacttcctctcctccggccacaccaggcctgatggggcccctgccctggagagtcctcgcatcgagataacctcgtgcttgggcctgtaccacaacaataaccagtttttccacgatgtggaggtggaagacgtcctccctagctccaaacggtccccctccacggccacgctgagtctgcccagcctggaggcctacagagacccctcgtgcctgagcccggccagcagcctgtcctcccggagctgcaactcagaggcctcctcctacgagtccaactactcgtacccgtacgcgtccccccagacgtcgccatggcagtctccctgcgtgtctcccaagaccacggaccccgaggagggctttccccgcgggctgggggcctgcacactgctgggttccccgcggcactccccctccacctcgccccgcgccagcgtcactgaggagagctggctgggtgcccgctcctccagacccgcgtccccttgcaacaagaggaagtacagcctcaacggccggcagccgccctactcaccccaccactcgcccacgccgtccccgcacggctccccgcgggtcagcgtgaccgacgactcgtggttgggcaacaccacccagt

SEQ ID NO: 2982 - DNA, 1081 bp, Artificial
  cDNA Sequence
ccagtgggcgaagcccaagcccctgtcccctacgtcctacatgagcccgaccctgcccgccctggactggcagctgccgtcccactcaggcccgtatgagcttcggattgaggtgcagcccaagtcccaccaccgagcccactacgagacggagggcagccggggggccgtgaaggcgtcggccggaggacaccccatcgtgcagctgcatggctacttggagaatgagccgctgatgctgcagcttttcattgggacggcggacgaccgcctgctgcgcccgcacgccttctaccaggtgcaccgcatcacagggaagaccgtgtccaccaccagccacgaggccatcctctccaacaccaaagtcctggagatcccactcctgccggagaacagcatgcgagccgtcattgactgtgccggaatcctgaaactcagaaactccgacattgaacttcggaaaggagagacggacatcgggaggaagaacacacgggtacggctggtgttccgcgttcacgtcccgcaacccagcggccgcacgctgtccctgcaggtggcctccaaccccatcgaatgctcccagcgctcagctcaggagctgcctctggtggagaagcagagcacggacagctatccggtcgtgggcgggaagaagatggtcctgtctggccacaacttcctgcaggactccaaggtcattttcgtggagaaagccccagatggccaccatgtctgggagatggaagcgaaaactgaccgggacctgtgcaagccgaattctctggtggttgagatcccgccatttcggaatcagaggataaccagccccgttcacgtcagtttctacgtctgcaacgggaagagaaagcgaagccagtaccagcgtttcacctaccttcccgccaacgttccaattataaaaacagaacccactgatgattatgagcctgctccaacctgtggaccggtgagccaggggttaagtcctctcccaagaccatactacagccagcagctcgcgatgccacccgaccccagctcctgcctcgtggccggcttcccgccctgtccgcagaga

SEQ ID NO: 2983 - DNA, 1506 bp, Artificial
  cDNA Sequence
ccagtgggcgaagcccaagcccctgtcccctacgtcctacatgagcccgaccctgcccgccctggactggcagctgccgtcccactcaggcccgtatgagcttcggattgaggtgcagcccaagtcccaccaccgagcccactacgagacggagggcagccggggggccgtgaaggcgtcggccggaggacaccccatcgtgcagctgcatggctacttggagaatgagccgctgatgctgcagcttttcattgggacggcggacgaccgcctgctgcgcccgcacgccttctaccaggtgcaccgcatcacagggaagaccgtgtccaccaccagccacgaggccatcctctccaacaccaaagtcctggagatcccactcctgccggagaacagcatgcgagccgtcattgactgtgccggaatcctgaaactcagaaactccgacattgaacttcggaaaggagagacggacatcgggaggaagaacacacgggtacggctggtgttccgcgttcacgtcccgcaacccagcggccgcacgctgtccctgcaggtggcctccaaccccatcgaatgctcccagcgctcagctcaggagctgcctctggtggagaagcagagcacggacagctatccggtcgtgggcgggaagaagatggtcctgtctggccacaacttcctgcaggactccaaggtcattttcgtggagaaagccccagatggccaccatgtctgggagatggaagcgaaaactgaccgggacctgtgcaagccgaattctctggtggttgagatcccgccatttcggaatcagaggataaccagccccgttcacgtcagtttctacgtctgcaacgggaagagaaagcgaagccagtaccagcgtttcacctaccttcccgccaacggtaacgccatctttctaaccgtaagccgtgaacatgagcgcgtggggtgctttttctaaagacgcagaaacgacgtcgccgtaaagcagcgtggcgtgttgcacatttaactgtgtgatgtcccgttagtgagaccgagccatcgatgccctgaaaaggaaaggaaaagggaagcttcggatgcattttccttgatccctgttgggggtggggggcgggggttgcatactcagatagtcacggttattttgcttcttgcgaatgtataacagccaaggggaaaacatggctcttctgctccaaaaaactgagggggtcctggtgtgcatttgcaccctaaagctgcttacggtgaaaaggcaaataggtatagctattttgcaggcacctttaggaataaactttgcttttaagcctgtagtcctgatgtggtctttaaggatggtgaatgagctttgtgctgggcggacgtccccgagacacttctccaggggtaacttcatctcctgggaccacgggcatccaggctggggcaccttctcctcaacctgcctgcccctcacccgccgtgggaatggctccttttcactcatac

SEQ ID NO: 2984 - DNA, 1506 bp, Artificial; identical to SEQ ID NO: 2983
  cDNA Sequence

SEQ ID NO: 2985 - DNA, 1037 bp, Artificial
  cDNA Sequence
ccagtgggcgaagcccaagcccctgtcccctacgtcctacatgagcccgaccctgcccgccctggactggcagctgccgtcccactcaggcccgtatgagcttcggattgaggtgcagcccaagtcccaccaccgagcccactacgagacggagggcagccggggggccgtgaaggcgtcggccggaggacaccccatcgtgcagctgcatggctacttggagaatgagccgctgatgctgcagcttttcattgggacggcggacgaccgcctgctgcgcccgcacgccttctaccaggtgcaccgcatcacagggaagaccgtgtccaccaccagccacgaggccatcctctccaacaccaaagtcctggagatcccactcctgccggagaacagcatgcgagccgtcattgactgtgccggaatcctgaaactcagaaactccgacattgaacttcggaaaggagagacggacatcgggaggaagaacacacgggtacggctggtgttccgcgttcacgtcccgcaacccagcggccgcacgctgtccctgcaggtggcctccaaccccatcgaatgctcccagcgctcagctcaggagctgcctctggtggagaagcagagcacggacagctatccggtcgtgggcgggaagaagatggtcctgtctggccacaacttcctgcaggactccaaggtcattttcgtggagaaagccccaggtatgctcttcaccaggggccatctgcggcctgggcttcggcgctggtgggaaccggttcccagtcggtggagcaggacccacctgtgcacggtcaccgggacggggcttatggggtgtggcacggagcagaggctctgcgtggcccgtgtctgcatccggctgtgggtttttgtgtgagccgacagctgtgctgctgaagggaagaggtggatgtttatttctggggccgccggggccactgcactcacatcgctgctgatactcagggagcccacgggctggggacgcagaggagggcaagacgcatttgctg

SEQ ID NO: 2986 - DNA, 857 bp, Artificial
  cDNA Sequence
ggaacggcaccacactctgtgtttacctctcaagacgctgatgagcaactcatcccacagaacagctggtcctgaacatgtgtgtgccctgccgtgaggcgcacaccttcccagaggcgtgagtggggcccggccactagtgtcctggcggaagcaccggggctgctccatttgtctggagtcctgtcccagtggtgtgggttttgagtctcacccacacggcgccggccgagaagccatgagcggctctgcagggtggtgcggactatagacacctccatgcatggttgccctaggcagtgtctgccgccagcgtctgcctctggacactagctgctcagccaccaggacggcgttgagcgctcccctgcctctgcaggaggagaggggcagggagccatcaggaagggtgctggggcctggggcccgtcgtgctgtgtgtgtgcaaacgcagtgtggcgtcccctgatcaggagtgggagctgcgcgctgcccggttccaggttaatggaacacaggaagctgcatggctacttggagaatgagccgctgatgctgcagcttttcattgggacggcggacgaccgcctgctgcgcccgcacgccttctaccaggtgcaccgcatcacagggaagaccgtgtccaccaccagccacgaggccatcctctccaacaccaaagtcctggagatcccactcctgccggagaacagcatgcgagccgtcattgactgtgccggaatcctgaaactcagaaactccgacattgaacttcggaaaggagagacggacatcgggaggaagaacacacgggtacggctggtgttccgcgttcacgtcccgcaacccagcggccg

SEQ ID NO: 2987 - DNA, 545 bp, Artificial
  cDNA Sequence
cctaaaactcagtgcccaggtccattgggataacaaggcattttctaatctgatttacaaagacaccagtatgacatggcagagaaataaaaagggggcagggcagggggacacaggcctcgaacccgccgcaggttttctctgcgttccggtgactcccggcggtctgtgctctgggtgctgagcaggtgttttctgttctctcgccagctgcatggctacttggagaatgagccgctgatgctgcagcttttcattgggacggcggacgaccgcctgctgcgcccgcacgccttctaccaggtgcaccgcatcacagggaagaccgtgtccaccaccagccacgaggccatcctctccaacaccaaagtcctggagatcccactcctgccggagaacagcatgcgagccgtcattgactgtgccggaatcctgaaactcagaaactccgacattgaacttcggaaaggagagacggacatcgggaggaagaacacacgggtacggctggtgttccgcgttcacgtcccgcaacccagcggccg

SEQ ID NO: 2988 - DNA, 931 bp, Artificial
  cDNA Sequence
atgcagcccagcgctcagctcaggagctgcctctggtggagaagcagagcacggacagctatccggtcgtgggcgggaagaagatggtcctgtctggccacaacttcctgcaggactccaaggtcattttcgtggagaaagccccagatggccaccatgtctgggagatggaagcgaaaactgaccgggacctgtgcaagccgaattctctggtggttgagatcccgccatttcggaatcagaggataaccagccccgttcacgtcagtttctacgtctgcaacgggaagagaaagcgaagccagtaccagcgtttcacctaccttcccgccaacggtaacgccatctttctaaccgtaagccgtgaacatgagcgcgtggggtgctttttctaaagacgcagaaacgacgtcgccgtaaagcagcgtggcgtgttgcacatttaactgtgtgatgtcccgttagtgagaccgagccatcgatgccctgaaaaggaaaggaaaagggaagcttcggatgcattttccttgatccctgttgggggtggggggcgggggttgcatactcagatagtcacggttattttgcttcttgcgaatgtataacagccaaggggaaaacatggctcttctgctccaaaaaactgagggggtcctggtgtgcatttgcaccctaaagctgcttacggtgaaaaggcaaataggtatagctattttgcaggcacctttaggaataaactttgcttttaagcctgtagtcctgatgtggtctttaaggatggtgaatgagctttgtgctgggcggacgtccccgagacacttctccaggggtaacttcatctcctgggaccacgggcatccaggctggggcaccttctcctcaacctgcctgcccctcacccgccgtgggaatggctccttttcactcatac

SEQ ID NO: 2989 - DNA, 1028 bp, Artificial
  cDNA Sequence
ctggtgctgacaccacagaagtgctggtgtggacctgtgggtcgcttggttcgtggagagacagccacagcatcttcccagcatcgcggccggcacctggcacctgcactttggccgtcagagacgtgctggtaccgtgctacggacgagggcggtcactctggcgaccccagctctctgccgaggcagccaggcactggctcacgacactcatggaccagggtgggaccgaggaggaaattaaatgaaataatacgaaatgacctctccagcacgagcacccactcctagttgccacattggagcactcagttcagcaggggtatgctgacttcagcagacaaagacttttgaataaataaactgaactcacacctggtaccactcagaacctccaactgactgaatgccaggagctgaacattaatatgtgcaaagattggctctccaacaagaaggaaagcagggaggaagggagaccactgtgtcacctggaggagaagtcatctcatgacaacagaagggaggtggccgggctgagcacgggagacccaccgtgcaggggcctttcatgggaacggcccacacgcagtttgaccccacgcccagcccttctggcacccctggggttcaatactggaagtgccttatttaaccagaccatcagggcatcatagaattgagcattgaatttgctactgtaggagtatttttaggagcagaaactgcaaacacatttcattgtgaggttttaccctctgtatgaatgaagagaacgctggaaggctgcgagaggactctagtatgagtctccaacatttggaacgtttcctgggctgtcacgtacactcctgctgccttacacagtgcattttagaatcttccagtctgtcatctcagctcttttgtaacatgcttcccttgtctgcgcggttgaaaccgtaggcttgttcatagtcgcatgctcgcatctttgtttttaatctggcttcgaacatagcacaagtaacttgaatagcacatcaata

SEQ ID NO: 2990 - DNA, 782 bp, Artificial
  cDNA Sequence
gctgtacgagctgcacgtcttcaccttcggcagccggctgtacgcacacaccatcgcaggctttttagaccccgagaagaagcttttttctcaccgaatattatcaagggatgaatgtattgacccattttctaaaacgggaaaccttagaaatctctttccttgtggagactcaatggtttgcattattgatgatcgagaagatgtctggaagtttgcccccaatctgataactgtgaagaaatatgtatacttccagggcacgggtgatatgaatgcgccccctgggtcccgagaatctcagacgagaaagaaagtaaatcattctcgaggcactgaggtctcagagccatctccgcccgtgagagaccctgagggggtaacgcaggcccctggagtggagcccagcaatggcctggagaagcctgcacgggagctgaacggcagcgaggccgccaccccgcgggactcaccccgccccgggaagccagacgagagggacatctggccccctgcccaggcccccaccagcagccaagagctggcaggcgctcctgagccccagggatcctgtgcgcagggtggccgggtggcaccgggacagcggcctgcccagggtgccacgggcactgacctggactttgacttatccagcgacagcgagagcagcagtgagtccgagggcacgaagtcctcctcctccgcctctgatggcgaaagcgaggggaaaagaggccggcagaagccgaaggctgccccagagggagccggggcgctggcac

SEQ ID NO: 2991 - DNA, 2100 bp, Artificial
  cDNA Sequence
tccctggagccggggcggcctgcagcaccgagtctccccggagaggccgagcctggcgcgcatgccccggacaaggagcctgagctgggtgggcaggaggagggcgagcgggatggcctctgcggcctgggcaacggctgtgccgacaggaaggaggcggagaccgagtcacagaacagcgagctgtcgggggtcactgcgggtgagtccctggaccagagcatggaggaggaggaggaggaggacacggatgaggatgaccacctcatctacctggaggagatcctggtccgtgtacacactgactactatgccaagtatgaccgctacctcaacaaggagatcgaggaggcgccggacatccgcaagatcgtgccggagctcaagagcaaggtgctggcagacgtggccataattttcagtgggctacacccgacaaacttcccgatagagaagacgcgggagcattaccacgccacggcgctgggagcgaagatcctcactcggctggtgctgagccccgacgcccctgacagggccacgcacctgatcgccgcgcgagctggcacagagaaggtgctgcaggcacaggagtgcggacacctgcacgtggtcaaccctgactggctgtggagctgcctggagcgctgggacaaggtggaggagcagctcttcccgctcagggacgatcacaccaaggcacagagggagaacagccctgcggcctttcccgaccgggagggtgtgccccccaccgccttgttccacccgatgccggttcttcccaaggcccagcctggccccgaggttcggatctacgactccaacacggggaagctcatcaggacgggcgcccgggggcccccagcaccctccagctccctacccatccgccaggagccctcttccttcagagcggttccgccaccccagccgcagatgtttggtgaagagctgcctgacgctcaggacggagagcagcctggcccttctagaagaaagcgacagcccagtatgtctgagacaatgccgctgtacactctttgtaaggaggatttagagagtatggacaaagaggtggacgacatccttggagaaggcagcgacgacagcgacagcgagaagaggaggcctgaggagcaggaggaggagccccagccccggaagccagggacccgcagggagcggacgctcggggcacctgcgtccagcgagaggagcgcggcagggggccgggggcccagaggccacaagaggaagctgaatgaagaggacgccgccagcgagtccagcagggagtccagcaacgaggatgagggcagcagctccgaggccgacgagatggccaaggcgctggaggcggagctcaacgacctcatgtgagcgcgggcagcgggcagggactgaagcctgaccgacctccagcagcactcggacgtccccggaccagccctcagtctcggtccacgctgctttcttcccaaaggacatgtatatttgcagagctccacatacagaaacacattattttgcagaaataggtgtttttaagaagttttactacaggaatgtctacttttgtaagtgacaggtgttaaaggcccaggtgtgctgtgccaaagagctcagcagaggctcacgtggcccaggctggtgcgcccgctgtctcggtaaggggcgggttggtgtgttttccccttgtgtaccagagcacattccttaggggacggctttgggggtcccacgagacatggactaggagtttaagcaggacagtgtgcgtgcacgagctccgagcccagcacagacatgcctggaacccccgccgcctgctgctccctcctagggaacccatttccggggaacgccgtgactgtcgggcagcctggagcttcctgcagcctcctacgcagggtccacgccacgtggcctgggctgccatcctgccgtcctcccactggcatcctggcaagggggcgttgcttttcctgggcggccttttatgtcttggagacacctgatgtaaagtttctgtaaatctatttcatatctgacccaccaaacagatttctctttaataaaaatcctttttgtaagttc

SEQ ID NO: 2992 - DNA, 888 bp, Artificial
  cDNA Sequence
gtaaggaggatttagagagtatggacaaagagaggccacaagaggaagctgaatgaagaggacgccgccagcgagtccagcagggagtccagcaacgaggatgagggcagcagctccgaggccgacgagatggccaaggcgctggaggcggagctcaacgacctcatgtgagcgcgggcagcgggcagggactgaagcctgaccgacctccagcagcactcggacgtccccggaccagccctcagtctcggtccacgctgctttcttcccaaaggacatgtatatttgcagagctccacatacagaaacacattattttgcagaaataggtgtttttaagaagttttactacaggaatgtctacttttgtaagtgacaggtgttaaaggcccaggtgtgctgtgccaaagagctcagcagaggctcacgtggcccaggctggtgcgcccgctgtctcggtaaggggcgggttggtgtgttttccccttgtgtaccagagcacattccttaggggacggctttgggggtcccacgagacatggactaggagtttaagcaggacagtgtgcgtgcacgagctccgagcccagcacagacatgcctggaacccccgccgcctgctgctccctcctagggaacccatttccggggaacgccgtgactgtcgggcagcctggagcttcctgcagcctcctacgcagggtccacgccacgtggcctgggctgccatcctgccgtcctcccactggcatcctggcaagggggcgttgcttttcctgggcggccttttatgtcttggagacacctgatgtaaagtttctgtaaatctatttcatatctgacccaccaaacagatttctctttaataaaaatcctttttgtaagttc

SEQ ID NO: 2993 - DNA, 1820 bp, Artificial
  cDNA Sequence
ctgtgcgtccttctcccatctccgtgcagttcaggagaggaggggagaacttgagttcacctcccggcactgggctcagcctctcccgccgccacatcgaggcactgacggtacccacctcccgcctgctgaggttcggggaggctgaggtttggatgcggtactcccatcacctgctcacttgcctgccgcctctgttgccactcccgtccgcgtcacacgtgtcaggcgtggggccggctgagctcaccccaggtgttcaggagtcgccctctctgcatgtttcccaaattggaggcgtgcccagagcgagcgggtggacatcttagcgagcgtccctgtggcacggccacgtctccacccccaggtggctgctctcccagattccaggatgggaaggactgggacgcctccctgaaagccctgccactcaggagtcttgctgtgaatctcattgatcttgaaaatttcaagcaaatattctgattattcaccataaaatccaacagtgcaccaggaataaagtccctgttcacataagggacagaaggaatttaaacccaatctttgcctgcgaaccgactgggtttgctctgtggatttccaagcgtcttttgcccggggctttgttaaggattggttgagtttcaagccccagggctcaggtagaaagcagagtgctacctccagcccccaccctgctgcactcagagccctggactctgccgggagaagcctgttgcggaggaacggggcccgggaaggaggtctgtcgctgactcttggctgtttgtcaggtggacgacatccttggagaaggcagcgacgacagcgacagcgagaagaggaggcctgaggagcaggaggaggagccccagccccggaagccagggacccgcagggagcggacgctcggggcacctgcgtccagcgagaggagcgcggcagggggccgggggcccagaggccacaagaggaagctgaatgaagaggacgccgccagcgagtccagcagggagtccagcaacgaggatgagggcagcagctccgaggccgacgagatggccaaggcgctggaggcggagctcaacgacctcatgtgagcgcgggcagcgggcagggactgaagcctgaccgacctccagcagcactcggacgtccccggaccagccctcagtctcggtccacgctgctttcttcccaaaggacatgtatatttgcagagctccacatacagaaacacattattttgcagaaataggtgtttttaagaagttttactacaggaatgtctacttttgtaagtgacaggtgttaaaggcccaggtgtgctgtgccaaagagctcagcagaggctcacgtggcccaggctggtgcgcccgctgtctcggtaaggggcgggttggtgtgttttccccttgtgtaccagagcacattccttaggggacggctttgggggtcccacgagacatggactaggagtttaagcaggacagtgtgcgtgcacgagctccgagcccagcacagacatgcctggaacccccgccgcctgctgctccctcctagggaacccatttccggggaacgccgtgactgtcgggcagcctggagcttcctgcagcctcctacgcagggtccacgccacgtggcctgggctgccatcctgccgtcctcccactggcatcctggcaagggggcgttgcttttcctgggcggccttttatgtcttggagacacctgatgtaaagtttctgtaaatctatttcatatctgacccaccaaacagatttctctttaataaaaatcctttttgtaagttc

SEQ ID NO: 2994 - DNA, 678 bp, Artificial
  cDNA Sequence
cttagctgtcgccacctcgcgccgggtccgcgcggcccacgggaccccccactgacgcccccggccagcggtccacatggacgtgcggggccctgaagcccccggcgggcgcgcgctgcgggacgcggcagaaaatctatttcaggaacttcaggaacattttcaagctctgacggcaacattaaacctcagaaatatccttttctacctttaacaaatgctgtgattctttcggactggtagattatcatggagtatctttttgttgtctggtagtagtaggtaatagtttacttaggatttcccagtatttacttctgtgcttttatgtggcttcctgatgtgttaattacccctcacctatagcaaaagctgtacctccggccgggtgcagtggctcacgcctgtaatcccagcactttgggaggccgaggtgggcagatcacgaggtcaggagatggagaccatcctggctaacacagtgaaaccccgtctctactaaaaatacaaaaaattagcccggcatggtggcgggcgcctgtagtcccaactactcaggaggctgaggcaggagaatggtgtgaacccgggaggtggagcttgcagtgagccgagatcgcgccactgcactccagcctgggtgacagagcgagactccgtctcaaaaaaaaaaaaaaa

SEQ ID NO: 2995 - DNA, 1358 bp, Artificial
  cDNA Sequence
cacacgccgccaccctcgcgtcagttgtcgctccgcgcctgcgcccgttgtctccctgctcgctccgggtcccggcgccgcgccatgtgggctgcggcgggcgggctgtggcgctcccgcgcgggtctccgggccctgttccgtagccgcgatgctgcgctatttccaggctgcgagcggggacttcactgctctgctgtctcctgcaagaactggctcaagaaatttgcctcgaaaaccaaaaaaaaggtttggtatgaaagtccttccttgggttctcactcgacttacaaaccatccaagttggaattcctcatgaggagcacctcaaagaaaaccaggaaggaagaccatgcgcgcctgagggccctgaacggcctcctctataaggcactgacagacctgctgtgtacccctgaagtgagtcaggagctgtatgaccttaacgtggagctctccaaggtttccctgactccagacttctcagcctgccgagcgtactggaagacaacgctctctgctgagcagaacgcacacatggaggctgtcctgcagagaagtgccgcgcacatgaggcaccttttgatgtcccagcagaccctgaggaatgtgccaccgatagtgtttgttcaagacaagggaaatgcagctctagctgagcttgatcagttactggcagtcgcagactttggaccccgggatgaaagagacaactttgtacaaaatgatttcagggaccctgatgccccacaaccctgcggcaccacagagccgaccacaagctccagtctgtgtgggatcgatcatgaggcgctcaacaagcagattatggagtacaaaaggaggaaagataaagggctcgggggcctggtgtggcaggggcaggtggctgagctgacaacgcagatgaaaaagggaaggaagagggccaagccccgcctggagcaggacagctccctcaagagttacctgtcaggcgaggaggttgaagatgacctggacctggttggtgccccggagtacgaatgctatgccccggacacagaggagttggaggcagagagaggaggtggcagaacagaggatggccacagctgcggagcaagcagggagtagatggagaggctctgcccatcccacatttgcagggaaaagcattggcacgcaacgcagcatgtggcttcattgaggcagttgatggagttaaaccatctgctcttctgctacttcaacattttctagcttttccgtgtatctaaacacaatttgctacacaagtcactgtttttttttccatgcactgtgtgtaatttaaaaattaaatggccatcttatcacagattctcacaaaaagaaaa

SEQ ID NO: 2996 - DNA, 662 bp, Artificial
  cDNA Sequence
cacacgccgccaccctcgcgtcagttgtcgctccgcgcctgcgcccgttgtctccctgctcgctccgggtcccggcgccgcgccatgtgggctgcggcgggcgggctgtggcgctcccgcgcgggtctccgggccctgttccgtagccgcgatgctgcgctatttccaggctgcgagcggggacttcactgctctgctgtctcctgcaagaactggctcaagaaatttgcctcgaaaaccaaaaaaaaggtttggtatgaaagtccttccttgggttctcactcgacttacaaaccatccaagttggaattcctcatgaggagcacctcaaagaaaaccaggaaggaagaccatgcgcgcctgagggccctgaacggcctcctctataaggcactgacagacctgctgtgtacccctgaagtgagtcaggagctgtatgaccttaacgtggagctctccaaggtttccctgactccagacttctcagcctgccgagcgtactggaagacaacgctctctgctgagcagaacgcacacatggaggctgtcctgcagagaagtgccgcgcacatgaggcaccttttgatgtcccagcagaccctgaggaatgtgccaccgatagtgtttgttcaagacaagggaaatgcagctctagctgaggt

SEQ ID NO: 2997 - DNA, 843 bp, Artificial
  cDNA Sequence
ctgctgtgtacccctgaagtgagtcaggagctgtatgaccttaacgtggagctctccaaggcaccttttgatgtcccagcagaccctgaggaatgtgccaccgatagtgtttgttcaagacaagggaaatgcagctctagctgagcttgatcagttactggcagtcgcagactttggaccccgggatgaaagagacaactttgtacaaaatgatttcagggaccctgatgccccacaaccctgcggcaccacagagccgaccacaagctccagtctgtgtgggatcgatcatgaggcgctcaacaagcagattatggagtacaaaaggaggaaagataaagggctcgggggcctggtgtggcaggggcaggtggctgagctgacaacgcagatgaaaaagggaaggaagagggccaagccccgcctggagcaggacagctccctcaagagttacctgtcaggcgaggaggttgaagatgacctggacctggttggtgccccggagtacgaatgctatgccccggacacagaggagttggaggcagagagaggaggtggcagaacagaggatggccacagctgcggagcaagcagggagtagatggagaggctctgcccatcccacatttgcagggaaaagcattggcacgcaacgcagcatgtggcttcattgaggcagttgatggagttaaaccatctgctcttctgctacttcaacattttctagcttttccgtgtatctaaacacaatttgctacacaagtcactgtttttttttccatgcactgtgtgtaatttaaaaattaaatggccatcttatcacagattctcacaaaaagaaaa

SEQ ID NO: 2998 - DNA, 742 bp, Artificial
  cDNA Sequence
cgttcctgccccagaactcagttgggggctcggagcaggagaagctgcacacggtggatgaagacctgatcattgaagttcaccagttatttttctcaagaatgtgaataacaatgggatttgcactcattatatttttagaatggcttcgcataattttcatgcatcctgtggacgatgaacacaaatgcagctgtggccgtgcctggcctgtgtgtgttgaacgcgttcctgccgtgcgggagccacctacccagcggagcctcagagtctgagttctcaatgagtcaacattttgggtgtgtatgccaagaggtgacacgaaacagaagttgggatcactgtggttaacctgagcatgttggagaccaaggagaggctgatgttaatgttggatttttgtgaaaatgattcctttcaaagaaagacctgtgacagttggtaattgcagctaatgtgtttccacaaacagccattttgtgttggcaatcacaccgtccaccatcagggttgctgacaggagcagtgttcaggagtctcagacagtggattgtgctgcttcaggcgcctgctggctggagggtttgcaggctgccaggggcctcagctgaagacctggacccacaggacccacagaggcaaattgttcagttgactgtacagtgtgagaatgaaacattaattccccttctccacctcatatgagaaatgtgaattgtcttttttaaatttgggaatctgg

SEQ ID NO: 2999 - DNA, 489 bp, Artificial
  cDNA Sequence
aggaccttaaaggctttgatccaggagagaaatactttcataacacatcatggggtgatgtttctctctgggaaccttctggaaagaaagtgagatatcgaacaaagccatactgttgtggcctctgtaaatactctacaaaggtgcttacttcattcaagaatcatttacatcgttaccatgaagatgaaattgaccaagagctggtgatcccttgcccaaactgtgtatttgcatctcagcccaaagttgtgggaaggcacttcagaatgttccatgcacctgtccggaaagtccagaactacacagtgaatattttaggtgaaactaaatcatctaggagcgatgtgataagtttcacatgtctaaaatgtaacttttcaaacactttgtactacagcatgaagaagcatgtgctggtagcccattttcactacttaattaactcctactttggcctaagaactgaggaaatgggtgagcaaccga

SEQ ID NO: 3000 - DNA, 561 bp, Artificial
  cDNA Sequence
tctgtgataagatggccatttaatttttaaattacacacagtgcatggaaaaaaaaacagtgacttgtgtagcaaattgtgtttagatacacggaaaagctagaaaatgttgaagtagcagaagagcagatggtttaactccatcaactgcctcaatgaagccacatgctgcgttgcgtgccaatgcttttccctgcaaatgtgggatgggcagagcctctccatctactccctgcttgctccgcagctgtggccatcctctgttctgccacctcctctctctgcctccaactcctctgtgtccggggcatagcattcgtactccggggcaccaaccaggtccaggtcatcttcaacctcctcgcctgacaggtaactcttgagggagctccagttcttgcaggagacagcagagcagtgaagtccccgctcgcagcctggaaatagcgcagcatcgcggctacggaacagggcccggagacccgcgcgggagcgccacagcccgcccgccgcagcccacatggcgcggcgccgggacccggagcgagcagggagacaacg

SEQ ID NO: 3001 - DNA, 889 bp, Artificial
  cDNA Sequence
gtgcgcgcccagacgttctgccgggtggcagtcccagcggagtttgcgtgtgcgggcgggaccggatttcgtccgtgggcccgggggcggcgggggccggggagtgaggggccggctgagcccacctcgctgggccctccctggcgccccgccttgggcggcggcgagcgcgcgggccgccatgtcgtacatgctcccgcacctgcacaacggctggcaggtggaccaggccatcctctcggaggaggaccgcgtggtcgtcatccgcttcggccacgactgggatcctacgtgcatgaagatggacgaggtcctgtacagcatcgccgagaaggttaaaaattttgcagttatttatcttgtggatattacagaagtgcctgacttcaacaaaatgtatgagttatacgatccatgtactgtcatgtttttcttcaggaacaagcacatcatgattgacttggggactggcaacaacaacaagattaactgggccatggaggacaagcaggagatggtggacatcatcgagacggtgtaccgcggggcccgcaaaggccgcggcctggtggtgtcccccaaggactactccaccaagtaccgctactgaggcgccctcagtctgcgcggataaatgtcgtggagccctttttgtatggaaacgttttaagctatttaaagcctttggaaaatacaggaagctccagggctggagcacctctgagatggaattgataacatggtcttaactcaccgaaataaacaagcacgtggtgagaggagcaggcctacttgtttgttctcaggaaacttaatgaatagattactgattttcctagtcaaagttaattcttacccttggagtaaaacgaaggtgtttatcctgtga

SEQ ID NO: 3002 - DNA, 670 bp, Artificial
  cDNA Sequence
gcggagtttgcgtgtgcgggcgggaccggatttcgtccgtgggcccgggggcggcgggggccggggagtgaggggccggctgagcccacctcgctgggccctccctggcgccccgccttgggcggcggcgagcgcgcgggccgccatgtcgtacatgctcccgcacctgcacaacggctggcaggtggaccaggccatcctctcggaggaggaccgcgtggtcgtcatccgcttcggccacgactgggatcctacgtgcatgaagatggacgaggtcctgtacagcatcgccgagaaggtggtggcataaacatcgggtggtgttcagatcctgctgccggcagctcgaggctaggatggctggagatgtgagggcctttgtctcatcacatccgagcacagctcagcaagatgctcttagctagaaaacagattttatgtgttaatgttaaaaattttgcagttatttatcttgtggatattacagaagtgcctgacttcaacaaaatgtatgagttatacgatccatgtactgtcatgtttttcttcaggaacaagcacatcatgattgacttggggactggcaacaacaacaagattaactgggccatggaggacaagcaggagatggtggacatcatcgagacggtgtaccgcggggcccgcaaag

SEQ ID NO: 3003 - DNA, 686 bp, Artificial
  cDNA Sequence
ggggagtgaggggccggctgagcccacctcgctgggccctccctggcgccccgccttgggcggcggcgagcgcgcgggccgccatgtcgtacatgctcccgcacctgcacaacggctggcaggtggaccaggccatcctctcggaggaggaccgcgtggtcgtcatccgcttcggccacgactgggatcctacgtgcatgaagatggacgaggtcctgtacagcatcgccgagaaggaacaagcacatcatgattgacttggggactggcaacaacaacaagattaactgggccatggaggacaagcaggagatggtggacatcatcgagacggtgtaccgcggggcccgcaaaggccgcggcctggtggtgtcccccaaggactactccaccaagtaccgctactgaggcgccctcagtctgcgcggataaatgtcgtggagccctttttgtatggaaacgttttaagctatttaaagcctttggaaaatacaggaagctccagggctggagcacctctgagatggaattgataacatggtcttaactcaccgaaataaacaagcacgtggtgagaggagcaggcctacttgtttgttctcaggaaacttaatgaatagattactgattttcctagtcaaagttaattcttacccttggagtaaaacgaaggtgtttatcctgtg

SEQ ID NO: 3004 - DNA, 693 bp, Artificial
  cDNA Sequence
ggcggcgagcgcgcgggccgccatgtcgtacatgctcccgcacctgcacaacggctggcaggtggaccaggccatcctctcggaggaggaccgcgtggtcgtcatccgcttcggccacgactgggatcctacgtgcatgaagatggacgaggtcctgtacagcatcgccgagaaggttaaaaattttgcagttatttatcttgtggatattacagaagtgcctgacttcaacaaaatgtatgagttatacgatccatgtactgtcatgtttttcttcagttaccatagaggttggtgaattagctacatgagcattagaccattctccaaaagtggagcctcctactcggaacaagcacatcatgattgacttggggactggcaacaacaacaagattaactgggccatggaggacaagcaggagatggtggacatcatcgagacggtgtaccgcggggcccgcaaaggccgcggcctggtggtgtcccccaaggactactccaccaagtaccgctactgaggcgccctcagtctgcgcggataaatgtcgtggagccctttttgtatggaaacgttttaagctatttaaagcctttggaaaatacaggaagctccagggctggagcacctctgagatggaattgataacatggtcttaactcaccgaaataaacaagcacgtggtgagagga

SEQ ID NO: 3005 - DNA, 656 bp, Artificial
  cDNA Sequence
gtggaccaggccatcctctcggaggaggaccgcgtggtcgtcatccgcttcggccacgactgggatcctacgtgcatgaagatggacgaggtcctgtacagcatcgccgagaaggttaaaaattttgcagttatttatcttgtggatattacagaagtgcctgacttcaacaaaatgtatgagttatacgatccatgtactgtcatgtttttcttcaggaacaagcacatcatgattgacttggggactggcaacaacaacaagattaactgggccatggaggacaagcaggagatggtggacatcatcgagacggtgtaccgcggggcccgcaaaggccgcggcctggtggtgtcccccaaggactactccaccaagtaccgctactgaggcgccctcagtctgcgcggataaatgtcgtggagccctttttgtatggaaacgttttaagctatttaaagcctttggaaaatacaggaagctccagggctggagcacctctgagatggaattgataacatggtcttaactcaccgaaataaacaagcacgtggtgagaggagcaggcctacttgtttgttctcaggaaacttaatgaatagattactgattttcctagtcaaagttaattcttacccttggagtaaaacgaaggt

SEQ ID NO: 3006 - DNA, 771 bp, Artificial
  cDNA Sequence
gtgggaggatagcttgagcctgggaggtcgaggctgcagtgagctgattgcaccattgcactctaggatgacagagtgagaccctgtctcaaaaaaacaaaacaaaaattgccctgatccacacaaattcttggttttgtttttataaatgtgcttctataaaatgaaagccaaagtgttctgttatttcagtttttttttttaatctccttttaggttaaaaattttgcagttatttatcttgtggatattacagaagtgcctgacttcaacaaaatgtatgagttatacgatccatgtactgtcatgtttttcttcaggaacaagcacatcatgattgacttggggactggcaacaacaacaagattaactgggccatggaggacaagcaggagatggtggacatcatcgagacggtgtaccgcggggcccgcaaaggccgcggcctggtggtgtcccccaaggactactccaccaagtaccgctactgaggcgccctcagtctgcgcggataaatgtcgtggagccctttttgtatggaaacgttttaagctatttaaagcctttggaaaatacaggaagctccagggctggagcacctctgagatggaattgataacatggtcttaactcaccgaaataaacaagcacgtggtgagaggagcaggcctacttgtttgttctcaggaaacttaatgaatagattactgattttcctagtcaaagttaattcttacccttggagtaaaacgaaggtgtttatcctgtga

SEQ ID NO: 3007 - DNA, 365 bp, Artificial
  cDNA Sequence
agttaccatagaggttggtgaattagctacatgagcattagaccattctccaaaagtggagcctcctactcggaacaagcacatcatgattgacttggggactggcaacaacaacaagattaactgggccatggaggacaagcaggagatggtggacatcatcgagacggtgtaccgcggggcccgcaaaggccgcggcctggtggtgtcccccaaggactactccaccaagtaccgctactgaggcgccctcagtctgcgcggataaatgtcgtggagccctttttgtatggaaacgttttaagctatttaaagcctttggaaaatacaggaagctccagggctggagcacctctgagatggaa

SEQ ID NO: 3008 - DNA, 463 bp, Artificial
  cDNA Sequence
aaaaacagtacaataaaatattgtttatagccttccctgtaaggaataggagagctattttttattcttcccaagattgtatttgatgtaaacatattttctgtagaagccatggcccttcagttcatatagttagaaaatttccttattggccaggcacgccactgcacccggccggaggtacagcttttgctataggtgaggggtaattaacacatcaggaagccacataaaagcacagaagtaaatactgggaaatcctaagtaaactattacctactactaccagacaacaaaaagatactccatgataatctaccagtccgaaagaatcacagcatttgttaaaggtagaaaaggatatttctgaggtttaatgttgccgtcagagcttgaaaatgttcctgaagttcctgaaatagattttctgcctgaaaaaataaaccgtaagacaattgaataa

SEQ ID NO: 3009 - DNA, 1140 bp, Artificial
  cDNA Sequence
gcggccgcggccatggtcttcggaggggtggtgccctacgtcccgcagtatcgggacattcgcaggacgcagaacgccgacggcttctccacctacgtgtgcctggtgctgctggtggccaacattttgcggatactcttctggtttggaaggcgctttgagtccccgctgctgtggcagagcgccatcatgatcctgaccatgctgctgatgctgaagctgtgcaccgaggtccgtgtggccaacgagctcaacgccaggcgccgctcctttacagctgcagatagcaaggatgaagaagtcaaggttgcccccaggcggtccttcctggacttcgacccccaccacttctggcagtggagcagcttctcggactacgtgcagtgcgtcctggccttcacgggcgtggcgggctacatcacctacctgtccattgactccgccctgtttgtggagaccctgggcttcctggctgtgctgaccgaagccatgctgggtgtgccccagctttaccgcaaccaccgccaccagtccacggagggcatgagcatcaagatggtgctcatgtggaccagtggtgacgccttcaagacggcctacttcctgctgaagggtgcccctctgcagttctccgtgtgcggcctgctgcaggtgctggtggacctggccatcctggggcaggcctacgccttcgcccgccacccccagaagccggcgccccacgccgtgcaccccactggcaccaaggccctctgacagtggggaggacgaggatgtgggaccgccagccgcgggcactggtgggccctgacctccccgcggggagggtgggtgctgtggcccctgcaggtgtggcagagatggggcatgggcattggggtctccatcagcctctgtggggtgtctcagggtgggcagtgggggtggggctgggacgctgtttgtgctcagcggggacagccagggttgatctggccccgagggttttggatgtttttaggatgacataaaaagcaagtgttttccccatttcctcttatgaaacaccgtctgagcccaaggtacacattgggcggcctgcaggaacctgctccaggtggacacacgggccagcagccgcgaaccttgaagctggggtga

SEQ ID NO: 3010 - DNA, 1161 bp, Artificial
  cDNA Sequence
gcggccgcggccatggtcttcggaggggtggtgccctacgtcccgcagtatcgggacattcgcaggacgcagaacgccgacggcttctccacctacgtgtgcctggtgctgctggtggccaacattttgcggatactcttctgtccttactaccattttgcaaaaccagcattcagcagatcacactctgtggaatgccaacattcaggatttggcaggtttggaaggcgctttgagtccccgctgctgtggcagagcgccatcatgatcctgaccatgctgctgatgctgaagctgtgcaccgaggtccgtgtggccaacgagctcaacgccaggcgccgctcctttacagacttcgacccccaccacttctggcagtggagcagcttctcggactacgtgcagtgcgtcctggccttcacgggcgtggcgggctacatcacctacctgtccattgactccgccctgtttgtggagaccctgggcttcctggctgtgctgaccgaagccatgctgggtgtgccccagctttaccgcaaccaccgccaccagtccacggagggcatgagcatcaagatggtgctcatgtggaccagtggtgacgccttcaagacggcctacttcctgctgaagggtgcccctctgcagttctccgtgtgcggcctgctgcaggtgctggtggacctggccatcctggggcaggcctacgccttcgcccgccacccccagaagccggcgccccacgccgtgcaccccactggcaccaaggccctctgacagtggggaggacgaggatgtgggaccgccagccgcgggcactggtgggccctgacctccccgcggggagggtgggtgctgtggcccctgcaggtgtggcagagatggggcatgggcattggggtctccatcagcctctgtggggtgtctcagggtgggcagtgggggtggggctgggacgctgtttgtgctcagcggggacagccagggttgatctggccccgagggttttggatgtttttaggatgacataaaaagcaagtgttttccccatttcctcttatgaaacaccgtctgagcccaaggtacacattgggcggcctgcaggaacctgctccaggtggacacacgggccagcagccgcgaaccttgaagctggggtga

SEQ ID NO: 3011 - DNA, 788 bp, Artificial
  cDNA Sequence
gcggccgcggccatggtcttcggaggggtggtgccctacgtcccgcagtatcgggacattcgcaggacgcagaacgccgacggcttctccacctacgtgtgcctggtgctgctggtggccaacattttgcggatactcttctggtttggaaggcgctttgagtccccgctgctgtggcagagcgccatcatgatcctgaccatgctgctgatgctgaagctgtgcaccgaggtccgtgtggccaacgagctcaacgccaggcgccgctcctttacagcatcaagatggtgctcatgtggaccagtggtgacgccttcaagacggcctacttcctgctgaagggtgcccctctgcagttctccgtgtgcggcctgctgcaggtgctggtggacctggccatcctggggcaggcctacgccttcgcccgccacccccagaagccggcgccccacgccgtgcaccccactggcaccaaggccctctgacagtggggaggacgaggatgtgggaccgccagccgcgggcactggtgggccctgacctccccgcggggagggtgggtgctgtggcccctgcaggtgtggcagagatggggcatgggcattggggtctccatcagcctctgtggggtgtctcagggtgggcagtgggggtggggctgggacgctgtttgtgctcagcggggacagccagggttgatctggccccgagggttttggatgtttttaggatgacataaaaagcaagtgttttccccatttcctcttatgaaacaccgtctgagccca

SEQ ID NO: 3012 - DNA, 1085 bp, Artificial
  cDNA Sequence
cggccgcggccatggtcttcggaggggtggtgccctacgtcccgcagtatcgggacattcgcaggacgcagaacgccgacggcttctccacctacgtgtgcctggtgctgctggtggccaacattttgcggatactcttctggtttggaaggcgctttgagtccccgctgctgtggcagagcgccatcatgatcctgaccatgctgctgatgctgaagctgtgcaccgaggtccgtgtggccaacgagctcaacgccaggcgccgctcctttacagacttcgacccccaccacttctggcagtggagcagcttctcggactacgtgcagtgcgtcctggccttcacgggcgtggcgggctacatcacctacctgtccattgactccgccctgtttgtggagaccctgggcttcctggctgtgctgaccgaagccatgctgggtgtgccccagctttaccgcaaccaccgccaccagtccacggagggcatgagcatcaagatggtgctcatgtggaccagtggtgacgccttcaagacggcctacttcctgctgaagggtgcccctctgcagttctccgtgtgcggcctgctgcaggtgctggtggacctggccatcctggggcaggcctacgccttcgcccgccacccccagaagccggcgccccacgccgtgcaccccactggcaccaaggccctctgacagtggggaggacgaggatgtgggaccgccagccgcgggcactggtgggccctgacctccccgcggggagggtgggtgctgtggcccctgcaggtgtggcagagatggggcatgggcattggggtctccatcagcctctgtggggtgtctcagggtgggcagtgggggtggggctgggacgctgtttgtgctcagcggggacagccagggttgatctggccccgagggttttggatgtttttaggatgacataaaaagcaagtgttttccccatttcctcttatgaaacaccgtctgagcccaaggtacacattgggcggcctgcaggaacctgctccaggtggacacacgggccagcagccgcgaaccttgaagctggggtga

SEQ ID NO: 3013 - DNA, 392 bp, Artificial
  cDNA Sequence
cggccatggtcttcggaggggtggtgccctacgtcccgcagtatcgggacattcgcaggacgcagaacgccgacggcttctccacctacgtgtgcctggtgctgctggtggccaacattttgcggatactcttctggtttggaaggcgctttgagtccccgctgctgtggcagagcgccatcatgatcctgaccatgctgctgatgctgaagctgtgcaccgaggtccgtgtggccaacgagctcaacgccaggcgccgctcctttacagctgcagatagcaaggatgaagaagtcaaggttgcccccaggcggtccttcctggcatcaagatggtgctcatgtggaccagtggtgacgccttcaagacggcctacttcctgctgaagggtg

SEQ ID NO: 3014 - DNA, 1072 bp, Artificial
  cDNA Sequence
ggtcttcggaggggtggtgccctacgtcccgcagtatcgggacattcgcaggacgcagaacgccgacggcttctccacctacgtgtgcctggtgctgctggtggccaacattttgcggatactcttctggtttggaaggcgctttgagtccccgctgctgtggcagagcgccatcatgatcctgaccatgctgctgatgctgaagctgtgcaccgaggtccgtgtggccaacgagctcaacgccaggcgccgctcctttacagacttcgacccccaccacttctggcagtggagcagcttctcggactacgtgcagtgcgtcctggccttcacgggcgtggcgggctacatcacctacctgtccattgactccgccctgtttgtggagaccctgggcttcctggctgtgctgaccgaagccatgctgggtgtgccccagctttaccgcaaccaccgccaccagtccacggagggcatgagcatcaagatggtgctcatgtggaccagtggtgacgccttcaagacggcctacttcctgctgaagggtgcccctctgcagttctccgtgtgcggcctgctgcaggtgctggtggacctggccatcctggggcaggcctacgccttcgcccgccacccccagaagccggcgccccacgccgtgcaccccactggcaccaaggccctctgacagtggggaggacgaggatgtgggaccgccagccgcgggcactggtgggccctgacctccccgcggggagggtgggtgctgtggcccctgcaggtgtggcagagatggggcatgggcattggggtctccatcagcctctgtggggtgtctcagggtgggcagtgggggtggggctgggacgctgtttgtgctcagcggggacagccagggttgatctggccccgagggttttggatgtttttaggatgacataaaaagcaagtgttttccccatttcctcttatgaaacaccgtctgagcccaaggtacacattgggcggcctgcaggaacctgctccaggtggacacacgggccagcagccgcgaaccttgaagctggggtga

SEQ ID NO: 3015 - DNA, 1126 bp, Artificial
  cDNA Sequence
ggtcttcggaggggtggtgccctacgtcccgcagtatcgggacattcgcaggacgcagaacgccgacggcttctccacctacgtgtgcctggtgctgctggtggccaacattttgcggatactcttctggtttggaaggcgctttgagtccccgctgctgtggcagagcgccatcatgatcctgaccatgctgctgatgctgaagctgtgcaccgaggtccgtgtggccaacgagctcaacgccaggcgccgctcctttacagctgcagatagcaaggatgaagaagtcaaggttgcccccaggcggtccttcctggacttcgacccccaccacttctggcagtggagcagcttctcggactacgtgcagtgcgtcctggccttcacgggcgtggcgggctacatcacctacctgtccattgactccgccctgtttgtggagaccctgggcttcctggctgtgctgaccgaagccatgctgggtgtgccccagctttaccgcaaccaccgccaccagtccacggagggcatgagcatcaagatggtgctcatgtggaccagtggtgacgccttcaagacggcctacttcctgctgaagggtgcccctctgcagttctccgtgtgcggcctgctgcaggtgctggtggacctggccatcctggggcaggcctacgccttcgcccgccacccccagaagccggcgccccacgccgtgcaccccactggcaccaaggccctctgacagtggggaggacgaggatgtgggaccgccagccgcgggcactggtgggccctgacctccccgcggggagggtgggtgctgtggcccctgcaggtgtggcagagatggggcatgggcattggggtctccatcagcctctgtggggtgtctcagggtgggcagtgggggtggggctgggacgctgtttgtgctcagcggggacagccagggttgatctggccccgagggttttggatgtttttaggatgacataaaaagcaagtgttttccccatttcctcttatgaaacaccgtctgagcccaaggtacacattgggcggcctgcaggaacctgctccaggtggacacacgggccagcagccgcgaaccttgaagctggggtga

SEQ ID NO: 3016 - DNA, 774 bp, Artificial
  cDNA Sequence
ggtcttcggaggggtggtgccctacgtcccgcagtatcgggacattcgcaggacgcagaacgccgacggcttctccacctacgtgtgcctggtgctgctggtggccaacattttgcggatactcttctggtttggaaggcgctttgagtccccgctgctgtggcagagcgccatcatgatcctgaccatgctgctgatgctgaagctgtgcaccgaggtccgtgtggccaacgagctcaacgccaggcgccgctcctttacagcatcaagatggtgctcatgtggaccagtggtgacgccttcaagacggcctacttcctgctgaagggtgcccctctgcagttctccgtgtgcggcctgctgcaggtgctggtggacctggccatcctggggcaggcctacgccttcgcccgccacccccagaagccggcgccccacgccgtgcaccccactggcaccaaggccctctgacagtggggaggacgaggatgtgggaccgccagccgcgggcactggtgggccctgacctccccgcggggagggtgggtgctgtggcccctgcaggtgtggcagagatggggcatgggcattggggtctccatcagcctctgtggggtgtctcagggtgggcagtgggggtggggctgggacgctgtttgtgctcagcggggacagccagggttgatctggccccgagggttttggatgtttttaggatgacataaaaagcaagtgttttccccatttcctcttatgaaacaccgtctgagccca

SEQ ID NO: 3017 - DNA, 206 bp, Artificial
  cDNA Sequence
caccacgggtacgggagcaccacgggtacgggagcaccacgggtgtggctggggacgggatgtcacaggcaccccatctccccatcgggccacaggaggcttggcctctgtccctgccgggagggccgggcagaagacgggcgacccacacagctggcacgttgtgagggcttggatggagtcctgaggctgagggagatggagca

SEQ ID NO: 3018 - DNA, 291 bp, Artificial
  cDNA Sequence
agacaccctgcttggactggggtggcctctgctacccaggggtctggcacgggggagggctggggctttctctgcctggtacacacggaaaggcggctgtgcggacgcagggtcaccgtgctccgggttttctgacagtcggtgtttcctgggcctttggaggtcctgcttagctctttggcctgtgagatgctttgaaaatttttatttttttaagatgaagcaagatgtctgtagcggtaattgcctcacattaaactgtcgccgactgcaggcgcagtgactgctgaa

SEQ ID NO: 3019 - DNA, 476 bp, Artificial
  cDNA Sequence
ctcttgtcagcctctggttctcctcgagtccttggggacgtggcagatgccagcgaccatcagacaacgtggaggccctcatgggcaatggctgagggggccgggctgaggctgtgcacatgcagtctgcacgccactcttgggctctgctggcggagatccccttccttctgggtgcagactgcacctccggatgcagttttgatgtccatcttccaggagagacggggccgcttcccgcaggcatctgagctctgtgccggggccgtggccatgggaagatgttccacgctgcctcctcctcgagttttcctcggaaacactcttgaatgtctgagtgagggtcctgcttagctctttggcctgtgagatgctttgaaaatttttatttttttaagatgaagcaagatgtctgtagcggtaattgcctcacattaaactgtcgccgactgcaggcgcagtgactgctgaatgta

SEQ ID NO: 3020 - DNA, 474 bp, Artificial
  cDNA Sequence
cgcagctgctcggaacagacctccaccaacatcacgtgctgacagtgttttcctgagctactgaataaaggaaatcaacattcccggtaaaaagtccagcagctgtccaggcttcgggagctgtggccagcaccacttctgatccctgaaattgctttcagaggggccagcagtagggccaggcaccagcctcagggtctcctctggatgtcaagtggggcacactactgctactgaggaggcagaggacagaccgttcatgcttagacccccctccccactacatcaggacactgtcaccttccagaccacacaactgagaaacagccacattataactagactccactgtcttcagcaggcctatcctggagatactgagaatcacatgaattttttggtttcccagtgaatataatccatgctgacactctactgcagcttattaaacattcaatagcattatatctaaaa

SEQ ID NO: 3021 - DNA, 419 bp, Artificial
  cDNA Sequence
ccgccggtagctcctgcctggccctgggaaacatcttcccacttcagccccgagcatccacccgtctgccgcgctggatcaggcctcagcgctgtgttccagcctcattcctcatcctctcgctgaaacgctcccgggatttcagcgcagcccctcaaaacacaacccagaatttcttggttaatggaaggatcaggaaatggatggcctggttaacggagcttagaaactcttcttggaagttttctgcaaacgtattattagtccagcaccttcagtggtggccaacatgagactctatttcaaatccttgaatacagtggatccctgaagaaagggcagaggccctcacagctttgggacaagatgatgaccatgtttgatttgacagaaacagccctgtacattttggacttgca

SEQ ID NO: 3022 - DNA, 551 bp, Artificial
  cDNA Sequence
tccagcaaaaaaatacggctttattggatctatttcctaactacaaagacagctgacacagacatcaaacgtttccttttcaatgacagtcccctgagaaaggctgcacgtgactcctacagtgccgggtgcagggtacccagccgcaggtgggacgcggccacacgtcttcacggttacgtgcagaccgacgggatggccttcaggttgtttctttccgtgagtgagacacaagagacgcgattgtgccggagcgcacgcatgttacaaaagagctgagatgacagactggaagattctaaaatgcactgtgtaaggcagcaggagtgtacgtgacagcccaggaaacgttccaaatgttggagactcatactagagtcctctcgcagccttccagcgttctcttcattcatacagagggtaaaacctcacaatgaaatgtgtttgcagtttctgctcctaaaaatactcctacagtagcaaattcaatgctcaattctatgatgccctgatggtctggttaaataaggcacttccagtattgaacccca

SEQ ID NO: 3023 - DNA, 640 bp, Artificial
  cDNA Sequence
cggaactcgcgggccatcggcgtgctgtgggccatcttcaccatctgctttgccatcgtcaacgtggtgtgcttcatccagccctactggataggcgacggcgtggacaccccgcaagccggctatttcgggctcttccactactgcatcggcaacggcttctcccgggagctgacctgcaggggcagcttcacggacttctccacgctgccctcgggcgccttcaaagccgcctccttctttatcggcctctccatgatgctcatcattgcctgcatcatttgctttaccctcttcttcttctgcaacacggccactgtgtacaagatatgtgcctggatgcagctcacctccgctgcctgccttgtgcttggctgtatgattttccctgatggctgggactcagatgaagtaaaacggatgtgtggagaaaagacagacaagtacactcttggggcttgctcagtccgctgggcatacatcctggctattattggaattttggatgccctgatcctctcatttctagcatttgtgcttggtaatcgacaagacagcttgatggcagaggaactgaaggcagaaaacaaagttctgctaagccaatattctctagaatgagcacaaaacaaatcgaata

SEQ ID NO: 3024 - DNA, 457 bp, Artificial
  cDNA Sequence
aagcatctataagaattgattatatgtcccagcactttggaaggctgaggcaagtggatcccttgggcctaggacttcgcgagaccagttgggcaacatgaacaagatggaagaaactacggtcacatatgcaaatggagaagatgatgaacacagaaaaattatgcaaagataatccctaaaccttctttctcatcaaaagttatagcaaggtggtttaatatatcactgacggaacacgatgctttgtttaatgaagactcagacggaaaggatcagacatcaacctataaatgcatcaaccagaaggaaagaccaattttgaaaactgttgagcattattctatacctctaagctgttcttttctgaaccatgaatcgggagaattattgtcactcatacatgagtatgagttgtaattctcaattcccaagtaaaaatcttcctgcttttgtt

SEQ ID NO: 3025 - DNA, 436 bp, Artificial
  cDNA Sequence
ctcctttggtggaggggctggcattacctttaggggctgatcaggtttgggaggtttagaagttggagagtggcaatcttcctccttattgagtgtttcattttctagagacttctcactctctctccttcatgcatttctgccagatgtggtggaggtcccagtctgtgatgactcacttcctgtcctcgaccgttcccgttcctgagtttcttcactttgccagcttgggtgtctctcccgaggcccccgtggagcagtgggaaggatggaacggtcaattggaggcgccctgtacacatcgtcatcgttactgtgccaagttgtagaaacatctccttccaggtcatccgtttcatcagcccagctgactggtttggaaacataggtgcttcctccaccagtacccccatcctcagccagaaagtctgttagg

SEQ ID NO: 3026 - DNA, 736 bp, Artificial
  cDNA Sequence
cttcttggagttttctacactgtttgtcgagatttgaaagagctcagacatctggcagtacttaattttcctaaatattgtgaacccgtggttaaaggagaagcaagtgaacgtgatactcgcaaactgtggagaaatattgaacctcatttgaagaaagctatgcagactgtttatctcagggaaatatcaagttcccagtgggaaaagctacagaaagatgacacagatccggggcaactgaaaggtatcagaggaagtattgagacagttaccggagatacttcttcagctaattatcaagatactaaagttaatactaaagagcattcagtcaggaaatagtgttataaaagagaatttacttttcaagctataatgctattttgattaatgatttttctttaactgaagctctaatttaatgggaggaaataaaagtttgaataccagctttctattttctaaatattggattatatcatgaaaatcaagcagtttctatttctttaaatgcttttattaaagcaatctaattatgtgacagttttatctcattatgtttatatttcatgagttttatggaataaaatgtaattttatgttaatcggtttgggatatgcactttggtggttatgttttgaaaacattgtgcttttgtttaagaaaactactactttggattcatcccaaatattaaatagaactaattttacttaaaaaaatgagcaaata

SEQ ID NO: 3027 - DNA, 670 bp, Artificial
  cDNA Sequence
ttagattacctctctagtgacccttcagctgttaaccctggttggccatgacgatcagcttgatggaccaaaatacaaatgcacagtgtctctagacttcatcagagctattgcaaggacggtgaactttgacataataaaatacttgtatgatttcttgtgaaaacaagcttcaaagccatatggacactgtgacaatgactaagccaagctgtgttcatccagctacttagctggccaaggagaggagttctttggctctattggatttgtccaaacaggtgctggcccagcatggaatctgatgaaaatattctgattggtctgggtggatgtgagcagaagactatttaccagggaccctggagtatttggaagcaacgtgttaattataaacagcagggtttgagcacaatctgttctactcttaatgatgttatcttaacactgaaattgcctgaaacccatttacttaggactacattttgctctgtgaactatcccctgcgctttgaacgtgccagcagcccttgtttatatgcccattcttttcacttcctctccacaggagcctctgcagtcgcttgccaaagcagattttcctaaggccactgttttaaaagatcatagttgcaaaatataataaatacaagttctttttaaaatccaa

SEQ ID NO: 3028 - DNA, 3167 bp, Artificial
  cDNA Sequence
aaagggctctgagtacctgcttgaacagagctccctggcctgtaatgctgagtgtgtcatgcttcaaaatgtatctaaagaatcttttgaaaggactattaatatagcaaaaggcaattctagcctaggaatgacagttagtgctaataaagatggcttggggatgatcgttcgaagcattattcatggaggtgccattagtcgagatggccggattgccattggggactgcatcttgtccattaatgaagagtctaccatcagtgtaaccaatgcccaggcacgagctatgttgagaagacattctctcattggccctgacataaagcacccagtcagtcagagtcagagccagagaaggctccattgtgcagtgtgcccccaccccctccttcagcctttgccgaaatgggtagtgatcacacacagtcatctgcaagcaaaatctcacaagatgtggacaaagaggatgagtttggttacagctggaaaaatatcagagagcgttatggaaccctaacaggcgagctgcatatgattgaactggagaaaggtcatagtggtttgggcctaagtcttgctgggaacaaagaccgatccaggatgagtgtcttcatagtggggattgatccaaatggagctgcaggaaaagatggtcgattgcaaattgcagatgagcttctagagatcaatggtcagattttatatggaagaagtcatcagaatgcctcatcaatcattaaatgtgccccttctaaagtgaaaataatttttatcagaaataaagatgcagtgaatcagatggccgtatgtcctggaaatgcagtagaacctttgccttctaactcagaaaatcttcaaaataaggagacagagccaactgttactacttctgatgcagctgtggacctcagttcatttaaaaatgtgcaacatctggagcttcccaaggatcaggggggtttgggtattgctatcagcgaagaagatacactcagtggagtcatcataaagagcttaacagagcatggggtagcagccacggatggacgactcaaagtcggagatcagatactggctgtagatgatgaaattgttgttggttaccctattgaaaagtttattagccttctgaagacagcaaagatgacagtaaaacttaccatccatgctgagaatccagattcccaggctgttccttcagcagctggtgcagccagtggagaaaaaaagaacagctcccagtctctgatggtcccacagtctggctccccagaaccggagtccatccgaaatacaagcagatcatcaacaccagcaatttttgcttctgatcctgcaacctgccccattatccctggctgcgaaacaaccatcgagatttccaaagggcgaacagggctgggcctgagcatcgttgggggttcagacacgctgctgggtgccattattatccatgaagtttatgaagaaggagcagcatgtaaagatggaagactctgggctggagatcagatcttagaggtgaatggaattgacttgagaaaggccacacatgatgaagcaatcaatgtcctgagacagacgccacagagagtgcgcctgacactctacagagatgaggccccatacaaagaggaggaagtgtgtgacaccctcactattgagctgcagaagaagccgggaaaaggcctaggattaagtattgttggtaaaagaaacgatactggagtatttgtgtcagacattgtcaaaggaggaattgcagatgccgatggaagactgatgcagggagaccagatattaatggtgaatggggaagacgttcgtaatgccacccaagaagcggttgccgctttgctaaagtgttccctaggcacagtaaccttggaagttggaagaatcaaagctggtccattccattcagagaggaggccatctcaaagcagccaggtgagtgaaggcagcctgtcatctttcacttttccactctctggatccagtacatctgagtcactggaaagtagctcaaagaagaatgcattggcatctgaaatacagggattaagaacagtcgaaatgaaaaagggccctactgactcactgggaatcagcattgctggaggagtaggcagcccacttggtgatgtgcctatatttattgcaatgatgcacccaactggagttgcagcacagacccaaaaactcagagttggggataggattgtcaccatctgtggcacatccactgagggcatgactcacacccaagcagttaacctactgaaaaatgcatctggctccattgaaatgcaggtggttgctggaggagacgtgagtgtggtcacaggtcatcagcaggagcctgcaagttccagtctttctttcactgggctgacgtcaagcagtatatttcaggatgatttaggacctcctcaatgtaagtctattacactagagcgaggaccagatggcttaggcttcagtatagttggaggatatggcagccctcatggagacttacccatttatgttaaaacagtgtttgcaaagggagcagcctctgaagacggacgtctgaaaaggggcgatcagatcattgctgtcaatgggcagagtctagaaggagtcacccatgaagaagctgttgccatccttaaacggacaaaaggcactgtcactttgatggttctctcttgaattggctgccagaattgaaccaacccaacccctagctcacctcctactgtaaagagaatgcactggtcctgacaatttttatgctgtgttcagccgggtcttcaaaactgtaggggggaaataacacttaagtttctttttctcatctagaaatgctttccttactgacaacctaacatcatttttcttttcttcttgcattttgtgaacttaaagagaaggaatatttgtgtaggtgaatctcgtttttatttgtggagatatctaatgttttgtagtcacatgggcaagaattattacatgctaagctggttagtataaagaaagataattctaaagctaaccaaagaaaatggcttcagtaaattaggatgaaaaatgaaaatataaaataaagaagaaaatctcggggagtttaaaaaaaatgcctcaatttggcaatctacctcctctccccaccccaaact

SEQ ID NO: 3029 - DNA, 6579 bp, Artificial
  cDNA Sequence
tgctgttaatcatttcagagaagaacactgaactttgaaaaaaatgttggaagccattgacaaaaatcgggccctgcatgcagcagagcgcttgcaaaccaagctgcgagaacgtggggatgtagcaaatgaagacaaactgagccttctgaagtcagtcctgcagagccctctcttcagtcagattctgagccttcagacttctgtacagcagctgaaagaccaggtaaatattgcaacttcagcaacttcaaatattgaatatgcccacgttcctcatctcagcccagctgtgattcctactctgcaaaatgaatcgtttttattatccccaaacaatgggaatctggaagcacttacaggacctggtattccacacattaatgggaaacctgcttgtgatgaatttgatcagcttatcaaaaatatggcccagggtcgccatgtagaagtttttgagctcctcaaacctccatctggaggccttgggtttagtgttgtgggactaagaagtgaaaacagaggagagctgggaatatttgttcaagagatacaagagggcagtgtggcccatagagatggaagattgaaagaaactgatcaaattcttgctatcaatggacaggctcttgatcagacaattacacatcagcaggctatcagcatcctgcagaaagccaaagatactgtccagctagttattgccagaggctcattgcctcagcttgtcagccccatagtttcccgttctccatctgcagccagcacaatttcagctcactctaatccggttcactggcaacacatggaaacgattgaattggtgaatgatggatctggtttgggatttggcatcataggaggaaaagcaactggtgtgatagtaaaaaccattctgcctggaggagtagctgatcagcatgggcgtttatgcagtggagaccacattctaaagattggtgacacagatctagcaggaatgagcagtgagcaagtagcacaagtccttaggcaatgtggaaatagagttaagttgatgattgcaagaggtgccatagaagaacgtacagcacccactgctttgggcatcaccctctcctcatccccaacttcaacaccagagttgcgggttgatgcttctactcagaaaggtgaagaaagtgagacatttgatgtagaactcactaaaaatgtccaaggattaggaattaccattgctggctacattggagataaaaaattggaaccttcaggaatctttgtaaagagcattacaaaaagcagtgccgttgagcatgatggaagaatccaaattggagaccaaattatagcagtagatggcacaaaccttcagggttttactaatcagcaagcagtagaggtattgcgacatacaggacaaactgtgctcctgacactaatgaggagaggaatgaagcaggaagccgagctcatgtcaagggaagacgtcacaaaagatgcagatttgtctcctgttaatgccagcataatcaaagaaaattatgaaaaagatgaagattttttatcttcgacgagaaacaccaacatattaccaactgaagaagaagggtatccattactgtcagctgagatagaagaaatagaagatgcacaaaaacaagaagctgctctgctgacaaaatggcaaaggattatgggaattaactatgaaatagtggtggcccatgtgagcaagtttagtgagaacagtggattggggataagcctggaagcgacagtgggacatcattttatccgatctgttctaccagagggtcctgttggacacagcgggaagctcttcagtggagacgagctattggaagtaaatggcataactttacttggggaaaatcaccaagatgtggtgaatatcttaaaagaactgcctatagaagtgacaatggtgtgctgtcgtcgaactgtgccacccaccacccaatcagaattggatagcctggacttatgtgatattgagctaacagaaaagcctcacgtagatctaggtgagttcatcgggtcatcagagacagaggatccagtgctggcgatgactgatgcgggtcagagtacagaagaggttcaagcacctttggccatgtgggaggctggcattcagcacatagagctggagaaagggagcaaaggacttggttttagcattttagattatcaggatccaattgatccagcaagcactgtgattataattcgttctttggtgcctggcggcattgctgaaaaggatggacgacttcttcctggtgaccgactcatgtttgtaaacgatgttaacttggaaaacagcagtcttgaggaagctgtagaagcactgaagggagcaccgtcagggactgtgagaataggagttgctaagcctttacccctttcaccagaagaaggttatgtttctgctaaggaggattcctttctctacccaccacactcctgtgaggaagcagggctggctgacaaacccctcttcagggctgacttggctctggtgggcacaaatgatgctgacttagtagatgaatccacatttgagtctccatactctcctgaaaatgacagcatctactctactcaagcctctattttatctcttcatggcagttcttgtggtgatggcctgaactatggttcttcccttccatcatctcctcctaaggatgttattgaaaattcttgtgatccagtacttgatctgcatatgtctctggaggaactatatacccagaatctcctgcaaagacaggatgagaatacaccttcggtggacataagtatggggcctgcttctggctttactataaatgactacacacctgcaaatgctattgaacaacaatatgaatgtgaaaacacaatagtgtggactgaatctcatttaccaagtgaagttatatcaagtgcagaacttccttctgtgctacccgattcagctggaaagggctctgagtacctgcttgaacagagctccctggcctgtaatgctgagtgtgtcatgcttcaaaatgtatctaaagaatcttttgaaaggactattaatatagcaaaaggcaattctagcctaggaatgacagttagtgctaataaagatggcttggggatgatcgttcgaagcattattcatggaggtgccattagtcgagatggccggattgccattggggactgcatcttgtccattaatgaagagtctaccatcagtgtaaccaatgcccaggcacgagctatgttgagaagacattctctcattggccctgacataaaaattacttatgtgcctgcagaacatttggaagagttcaaaataagcttgggacaacaatctggaagagtaatggcactggatattttttcttcatacactggcagagacattccagaattaccagagcgagaagagggagagggtgaagaaagcgaacttcaaaacacagcatatagcaattggaatcagcccaggcgggtggaactctggagagaaccaagcaaatccttaggcatcagcattgttggtggacgagggatggggagtcggctaagcaatggagaagtgatgaggggcattttcatcaaacatgttctggaagatagtccagctggcaaaaatggaaccttgaaacctggagatagaatcgtagaggtggatggaatggacctcagagatgcaagccatgaacaagctgtggaagccattcggaaagcaggcaaccctgtagtctttatggtacagagcattataaacagaccaaggaaatcccctttgccttccttgctgcacaacctttaccctaagtacaacttcagcagcactaacccatttgctgactctctacaaatcaacgccgacaaggcacccagtcagtcagagtcagagccagagaaggctccattgtgcagtgtgcccccaccccctccttcagcctttgccgaaatgggtagtgatcacacacagtcatctgcaagcaaaatctcacaagatgtggacaaagaggatgagtttggttacagctggaaaaatatcagagagcgttatggaaccctaacaggcgagctgcatatgattgaactggagaaaggtcatagtggtttgggcctaagtcttgctgggaacaaagaccgatccaggatgagtgtcttcatagtggggattgatccaaatggagctgcaggaaaagatggtcgattgcaaattgcagatgagcttctagagatcaatggtcagattttatatggaagaagtcatcagaatgcctcatcaatcattaaatgtgccccttctaaagtgaaaataatttttatcagaaataaagatgcagtgaatcagatggccgtatgtcctggaaatgcagtagaacctttgccttctaactcagaaaatcttcaaaataaggagacagagccaactgttactacttctgatgcagctgtggacctcagttcatttaaaaatgtgcaacatctggagcttcccaaggatcaggggggtttgggtattgctatcagcgaagaagatacactcagtggagtcatcataaagagcttaacagagcatggggtagcagccacggatggacgactcaaagtcggagatcagatactggctgtagatgatgaaattgttgttggttaccctattgaaaagtttattagccttctgaagacagcaaagatgacagtaaaacttaccatccatgctgagaatccagattcccaggctgttccttcagcagctggtgcagccagtggagaaaaaaagaacagctcccagtctctgatggtcccacagtctggctccccagaaccggagtccatccgaaatacaagcagatcatcaacaccagcaatttttgcttctgatcctgcaacctgccccattatccctggctgcgaaacaaccatcgagatttccaaagggcgaacagggctgggcctgagcatcgttgggggttcagacacgctgctgggtgccattattatccatgaagtttatgaagaaggagcagcatgtaaagatggaagactctgggctggagatcagatcttagaggtgaatggaattgacttgagaaaggccacacatgatgaagcaatcaatgtcctgagacagacgccacagagagtgcgcctgacactctacagagatgaggccccatacaaagaggaggaagtgtgtgacaccctcactattgagctgcagaagaagccgggaaaaggcctaggattaagtattgttggtaaaagaaacgatactggagtatttgtgtcagacattgtcaaaggaggaattgcagatgccgatggaagactgatgcagggagaccagatattaatggtgaatggggaagacgttcgtaatgccacccaagaagcggttgccgctttgctaaagtgttccctaggcacagtaaccttggaagttggaagaatcaaagctggcagcctgtcatctttcacttttccactctctggatccagtacatctgagtcactggaaagtagctcaaagaagaatgcattggcatctgaaatacagggattaagaacagtcgaaatgaaaaagggccctactgactcactgggaatcagcattgctggaggagtaggcagcccacttggtgatgtgcctatatttattgcaatgatgcacccaactggagttgcagcacagacccaaaaactcagagttggggataggattgtcaccatctgtggcacatccactgagggcatgactcacacccaagcagttaacctactgaaaaatgcatctggctccattgaaatgcaggtggttgctggaggagacgtgagtgtggtcacaggtcatcagcaggagcctgcaagttccagtctttctttcactgggctgacgtcaagcagtatatttcaggatgatttaggacctcctcaatgtaagtctattacactagagcgaggaccagatggcttaggcttcagtatagttggaggatatggcagccctcatggagacttacccatttatgttaaaacagtgtttgcaaagggagcagcctctgaagacggacgtctgaaaaggggcgatcagatcattgctgtcaatgggcagagtctagaaggagtcacccatgaagaagctgttgccatccttaaacggacaaaaggcactgtcactttgatggttctctcttgaattggctgccagaattgaaccaacccaacccctagctcacctcctactgtaaagagaatgcactggtcctgacaatttttatgctgtgttcagccgggtcttcaaaactgtaggggggaaataacacttaagtttctttttctcatctagaaatgctttccttactgacaacctaacatcatttttcttttcttcttgcattttgtgaacttaaagagaaggaatatttgtgtaggtgaatctcgtttttatttgtggagatatctaatgttttgtagtcacatgggcaagaattattacatgctaagctggttagtataaagaaagataattctaaagctaaccaaagaaaatggcttcagtaaattaggatg

SEQ ID NO: 3030 - DNA, 324 bp, Artificial
  cDNA Sequence
atgtggaaaggaaagaaggccaaggggaagaaggtggctccggcccctgctgtcttgaagaagcaggaggccaagaaagtggtcaaccccctgtttgagaaaaggcctaagaattttggcattagacaggacatccagcccaaaagagacctcgcccgctttgtgaaatggccccgctatagcaggttgcagcggcagagagtcatcctctataagcgactgaaaatgcctcctgcgattaaccagttcacccaggacctggaccaccaaacagctactcagctgcttaagctgccccacaagtacagaccagagacaaagcaa

SEQ ID NO: 3031 - DNA, 1967 bp, Artificial
  cDNA Sequence
catcttttcctcacccctctgtcttccacaggatgaatttcacccattcatcgaggcacttcttccacatgtccgtgcaattgcctatacttggttcaacctgcaggctcgaaaacgcaagtactttaaaaagcatgagaagcgaatgtcaaaggatgaagaaagagcagtcaaagatgagcttctcagtgaaaagcctgaaatcaaacagaagtgggcatccaggctccttgccaaactgcgcaaagatattcgccaggagtatcgagaggactttgtgctcaccgtgactggcaagaagcacccgtgctgtgtcttatccaatcccgaccagaagggtaagattaggagaatcgactgcctgcgacaggcagacaaagtctggcgtctggatctagtcatggtgatcctgttcaaaggcatccccttggaaagtaccgatggagagcggctcatgaaatccccacattgcacaaacccagcactttgtgtccagccacatcatatcacagtatcagttaaggagcttgatttgtttttggcatactacgtgcaggagcaagattctggacaatcaggaagtccaagccacaatgatcctgccaagaatcctccaggttaccttgaggatagttttgtaaaatctggagtcttcaatgtatcagaacttgtaagagtatccagaacgcccataacccagggaactggagtcaacttcccaattggagaaatcccaagccaaccatactatcatgacatgaactcgggggtcaatcttcagaggtctctgtcttctccaccaagcagcaaaagacccaaaactatatccatagatgaaaatatggaaccaagtcctacaggagacttttacccctctccaagttcaccagctgctggaagtcgaacatggcacgaaagagatcaagatatgtcttctccgactactatgaagaagcctgaaaagccattgttcagctctgcatctccacaggattcttccccaagactgagcactttcccccagcaccaccatcccggaatacctggagttgcacacagtgtcatctcaactcgaactccacctccaccttcaccgttgccatttccaacacaagctatccttcctccagccccatcgagctacttttctcatccaacaatcagatatcctccccacctgaatcctcaggatactctgaagaactatgtaccttcttatgacccatccagtccacaaaccagccagtcctggtacctgggctagcttggttcctttccaagtgtcaaataggacacccatcttaccggccaatgtccaaaattacggtttgaacataattggagaacctttccttcaagcagaaacaagcaactgagggaaaaagaaacacaacaatagtttaagaaattttttttttaaataaaaaaaaaggaaaagaggaagactggacaaaacaacacaaaggcagaaaggaaagaaactgaagaaagaagataatagaccagcaattgcagcacttacaatcactaattcccttaaggttgaaactgtaatgacataaaaagggtcgatgatatttcactgatggtagatcgcagcccctgcaacgtagcctttgttacatgaagtccgctgggaaatagatgttctgtctctatgacaatatattttaactgactttctagatgccttaatatttgcatgataagctagttttattggtttagtattcttgttgtttacgcatggaatcactattcctggttatctcaccaacgaaggctaggaggcggcgtcagaggtgctgggtgacagagccatgagccagccattttataagcactctgatttctaaaagttaaaaaaaatatatgaaatctctgtagcctttagttatcagtacagatttattaaatttcggcccttaacccagccttttccagtgtgtaacccagtttgaaatctt

SEQ ID NO: 3032 - DNA, 3198 bp, Artificial
  cDNA Sequence
tcccatcgcggctcccgggagctaagcgagacggcgacggcggcagtcgtccctccccacgcgggcgcgcgggcatgcggacacccactcggccggtccaggccctcaggctcccggaagcggaaggggagagcggcccggcctgggcggcggcgccggaggaggcggaggtggcgcggcaggaggaggggaaagagctgctggcggtcgggagagcggcggcagcgagaggcgagccagcggcgacgaatgaagaactttttcacttactgcaggattttcagcttcagcaagcaggttctcatggagaactgttattgaagagagatccatttggtgggatataattaaaaaaaatgaatcaaaagaaaatctctaaatgcagattccagaaaaattacagcacatctcagtgaatttgcaagtggatcatccttccttgtgggttagcaggcagttataagattgcaaaatgggtctccggattcactttgttgttgacccacatggttggtgctgcatgggtttgattgtctttgtttggttatacaatattgttttaattcccaaaattgtcctctttcctcactatgaagaaggacatattccaggcatattaataataatattctatggcatttccatattctgtctggttgccttagtgagggcctccataactgatccaggaagactccctgagaaccccaagatcccacatggagaaagggagttctgggaattatgtaacaagtgtaatttgatgagaccaaagcgttcccatcactgtagccgctgcggccactgtgtgaggagaatggatcatcactgtccatggattaacaattgtgttggtgaagataatcattggctctttctgcagttgtgtttctacactgaacttcttacttgctacgcactgatgttttctttctgccactattactattttcttccactaaaaaagcgtaatttggacctctttgtttttagacatgaattggccataatgagactagcagcctttatgggcattactatgttagttggaataactggactcttttacactcaactaattggcatcatcacagatacaacatctattgaaaagatgtcaaactgttgtgaagatatatcgaggccccgaaagccatggcagcagaccttctcagaagtttttggcactcgttggaagatcctgtggttcattcctttcaggcagaggcaaccactgcgagttccctaccactttgccaatcatgtctaaacagatggatggtgggcacagatgggtcctccatgctggcaatgcgttacaggttttatgataatagaactatgacagtcttcaagtcaattaaaatccacccaccagtcttaggcatcataatgtgccccaggctttattttaatagtgatcttgatcctgttgtgggactaatacaagatctatatttaagttttaaagcatgtttactttcaaattagctttccacagggatttcttgaaatgcttttgttattaaactcaaaaggcagtgattaggatgaaataattgtacataatttattttagtactgacagtgttacagattctaatttatggtaaatttcagatgtttatttaaaattttcacttttaaacagtaaccaaatctaaatttaattattcaggttttacaaaagttgatacaccttcttatagtataggtaaattttctttttcaaatccaatttaaaataacctttccttttaaatgtgctgcaacgtttttaaaaatgcagcagcataggagtgaacaacagcaacacaaaacgggcattggtttcttaggagtggcttgcttacgttttcttcttttttcttcaccaaaaccaacatgaaagtaccactgaagtaaaacaccaactacctaccttactataaaggaaatgttaaaatttttttcacaataattttttcaattttcactattactgttgtaattattgattgtgattaaaatatttgctcccaggagaactcctgaccagtgggcatgtattcctattttatcctaagattttaatgagcaaaaaggggagagaatttgcaataacttcacaattaccttttctagtgcagttatattagaatgcatatgtttttaaaatgctagtataactagatagtatataatgtacagtataaagaggaatattgtgcttttgaaaagagtatactttttacttttatttatgtactagtagatgtaaaatttcacattgaaggtttatatatattggccaactcatatagaaattttatttataggaagctactactaaaaaaagtcactaactttgtgtacctataatccctaaattaaaattaaattttaattggctggctgtaatttgcattgagagaccttttactagtagctagtgttaggaagtgaacctaaaataagaaaatataatgatctgtgtttatcattagccttgtacaaatgtaaattactaatagtgatgttcttttgcaaggcatagaacatttgtatgaaaagacatttagtatgctttgaaaaaaactcagcttttagtttttttccattagaatactgcaaaacccatatatctttttaaaaaatttatgtactcacagtctttcccttgaagagaagattgaaaaagtctactgttcataaaccatgctaacattttccttttagctagttttgaaagtaaggaacaatacctgggaaataattaaacagaaggttaccattgtcagccagttggctatactgtggttagttctttcagaaattgtaaatatcttgtagcatattctgaaataatagagtaagttcttctcagagatgttaatatcatgtttttcatgttctaattagaatactttattacttacaaactcagaaatacgaacagaaatacagcagacgaacatatttattggtactgaaaagagacgtagtaaattaaatagaagaaatatatttataaagcttagtgaaacacaaaattagaatgttcatgtcaggcacaagggtttggattttgtgcaagctaatttggccacatttggcctggtgacagaactgttcataaggaagtaatatatagataaggtaggtagatatcagttgaatgccttatattgtatacattcctttcaaataaagaccttg

SEQ ID NO: 3033 - DNA, 804 bp, Artificial
  cDNA Sequence
atgcatctcctcttatttcagctgctggtactcctgcctctaggaaagaccacacggcaccaggatggccgccagaatcagagttctctttcccccgtactcctgccaaggaatcaaagagagcttcccacaggcaaccatgaggaagctgaggagaagccagatctgtttgtcgcagtgccacaccttgtagccaccagccctgcaggggaaggccagaggcagagagagaagatgctgtccagatttggcaggttctggaagaagcctgagagagaaatgcatccatccagggactcagatagtgagcccttcccacctgggacccagtccctcatccagccgatagatggaatgaaaatggagaaatctcctcttcgggaagaagccaagaaattctggcaccacttcatgttcagaaaaactccggcttctcagggggtcatcttgcccatcaaaagccatgaagtacattgggagacctgcaggacagtgcccttcagccagactataacccacgaaggctgtgaaaaagtagttgttcagaacaacctttgctttgggaaatgcgggtctgttcattttcctggagccgcgcagcactcccatacctcctgctctcactgtttgcctgccaagttcaccacgatgcacttgccactgaactgcactgaactttcctccgtgatcaaggtggtgatgctggtggaggagtgccagtgcaaggtgaagacggagcatgaagatggacacatcctacatgctggctcccaggattcctttatcccaggagtttcagcttga

SEQ ID NO: 3034 - DNA, 6114 bp, Artificial
  cDNA Sequence
acacaaaaagccttacaaatggaagaactaaggtggtacttaaaaacagcaccttaggatctagttccatcctatcttttcccttaaatgccatgacaaaagttaaaacgggccctgtcccttctgaatgctgggcttctcatctaaatttaaataaaaacctttgaagatgggaatgtgttggaagaaaagaagggcagaaaaaaagtgtgttggaagagtctgtggagtcctgaggcttggcgctcaggaagtttgcaaagctgcagcagctgccttggagaagaccagcaaagaaagtggagtgtgtatgtgaacttcaattctgtattttctgtgaggtgggttaatggatttttagtaaaaagaaatctcaaacacagctgacctgaaagactggaatttcagctctcttccttcccggggttctttttcctcccccttcctctcaaagccctttaaaccagattgctgtgtcagtgactcttatcctgcccgccagttccaagggtttctaactttttgtcttggaaaggaaaaccactacctgattagaaaagcacttgggaagcccattaatcttgccggcgttgtcaggagtgatcagcgagttttattaaaagccctgggattgcctgaaaggcccccttgtctgactttgaaatgaaaggggcatgttaagatctcggggcacattgtcaggacccctcaccctgccccttggactatgagctgaccctccaggaggaagcacagaagccctcctttgttaaagggatttcgccggtggacagagaagagttgggccctgtcagcatgaactctctgagttggggggctgcgaatgccgtgctgctgctgctcctcctggcctgggccagccccaccttcatcagcatcaaccgcggggtgagggtgatgaagggccactctgccttcctgtcaggagatgacctgaagtttgccatccctaaagagaaagatgcctgcaaagtggaagttgtgatgaatgagccaataacccagagggttgggaaactcactccacaggtctttgactgccatttccttcccaacgaagtcaagtatgttcacaatggttgtccaattcttgatgaagacacagtgaagctcagactttacagatttactgaaagagataccttcatagaaacttttatcctgtgggtctatctcctggaaccagactgtaacatcatccatatgagtaacaatgtgctggaggtgcctgaattcaatggcttgtcccaagcgattgataaaaatctgctcagattcgattatgataggatggctagcctggaatgtaccgtcagcctggacactgcgagaactcggctgccagcccatggccagatggttctcggggagcctcgaccagaagaacctcgtggagatcagccacacagttttttcccagagtcccaactgagagcaaaactgaagtgtccaggtgggagctgtaccccaggattaaagaaaataggaagcctcaaagtgagctgtgaggagttcctgctgatgggccttcgttatcagcatctggatcccccttcacccaacattgattatatctccatccaactggacctcacagataccaggagcaaaattgtgtacaaggtagagagtgcgtggctgcctgtctatatcagagctggaattccgaatcagattccaaaggctgcattcatggccgtgtttattctggaagtggatcagttcatcctgacctccttgactacatcagttctggactgtgaagaagatgagacccctaaacccttgctggtgttcaacattactaaagccccgctccagggctatgtgactcacctgttggatcacaccagaccaatctcctcattcacctggaaagatctcagtgacatgcagatcgcctatcagccaccaaacagcagccattctgagaggagacatgatgaggtagaattggaggtatacgacttcttctttgaaaggagtgcacctatgacagtccacatctccatcagaacagcagatacaaatgccccccgtgtatcctggaatacaggtctgagtctccttgaggggcagtctcgagccatcacttgggaacagtttcaggttgtcgacaatgacgacattggtgctgtccggctagtcaccgttggtggcctgcagcatggatggctgactttaagaggggggaaagggtttctcttcaccgtggctgacctccaggctggagttgttcgctatcatcatgatgacagcgactccaccaaagacttcgtggtcttccggatatttgatggccatcacagcatccgtcacaaattccccatcaacgtcttgcccaaagatgatagtcccccgttcctcataaccaatgttgtgattgaactggaggaggggcagaccatcctgatccagggatccatgctgcgagcttcagatgtggacgccagtgatgactacatcttcttcaatatcacaaagcctccacaggctggggagatcatgaagaagccagggccaggactgataggcttgtacaaaagtatgtggtgttttatggacccaataggctatcctgtccatggcttccttcagagggatttgtttaatggaatcatttattatcgtcattttggtggagaaatctttgaagattcttttcaatttgtcctgtgggacagccatgaacctccaaatctttcagtgccacaggtggcaacaatccatataactccagtggatgaccagcttccaaaagaggctcctggagtttctcggcatttggttgtcaaggaaactgaggtggcctatataactaagaaacagctacattttatagattcagaatcatatgacagggagctggtctacacaataactactcctccatttttctccttcagccacaggtatctgaaaacttttgatccttgcaagtcagcacccacatatccatctcaacttactttgcagcatgctgtgaactatatgaaagtggcctacatgccccccatgcaagacattggtccccattgcagagatgtccagttcacattttctgtcagtaaccaacatggcggtactttgcatgggatctgctttaacattacaatcctcccagtggacaatcaagttcctgaggcgttcaccaaccctctgaaagtgactgagggaggtcaaagcatcatcagcacagagcacattctaatttctgatgcagataccaagctggacaatattgacctctccctgcgggaattgcctctgcacggaagggtggagctgaatggatttcctctaaattcagggggcacattttcttggggcgatctccataccttaaaagttaggttagaacatttcatggatgacctactcttggaggtcaccgatggcacaaattcagcagaatttgtactacatgttgaggtattccctgtcaacgatgagccaccagtcttaaaggctgacctcatgcctgtcatgaattgctcagagggaggagaggtggtcatcacctctgaatacatttttgctactgatgtggacagcgataacttgaagttgatgtttgtgattgctcgcgaacctcagcatggggtggtgaggagagctggagtcacagtggatcagttctctcagagagatgttatctcagaggccgtgacatacaaacacacaggtggcgagattggcctgatgccttgttttgacaccattacattggtggtttcggatggagaggctggcccttttgtgaatggctgttgctacaatggacccaatccatctgttccacttcatgcgtcctttccagtgtatgatctcaacatcacggtatacccagtagacaaccagccaccttccattgcaataggtcccgtgtttgttgtagatgagggctgctcaacagcccttactgttaaccatttgtccgccactgaccctgacactgcagcagatgacttggaatttgttttggtttctcctcctcagtttggctacctcgaaaatatactcccttctgtgggttttgaaaaaagcaatattggcataagtatagattcatttcagtggaaagacatgaacgcttttcacattaactatgtgcagtccaggcatctgaggatagaaccaactgccgaccagttcacggtgtacgtcacagatgggaagcatcactccttggagataccattttctattataatcaaccccacaaatgatgaagctcctgactttgtagtgcagaatattactgtgtgtgagggtcagatgaaagagctggactcttccatcatcagcgctgtggacctggacattccccaggatgccctgctgttcagcatcactcaaaagccacgccatggcctcctcatcgatagggggtttagcaaagacttctctgagaataagcagccagccaaccctcaccagaaacatgcacctgttcacagcttttccatggaactcctcaagactggaatgaggttgacgtacatgcatgatgactcagagagccttgctgatgattttacaatccaattgtcagatgggaaacataagatacttaaaaccatttcagtagaggtcatcccagttaatgatgaaaaaccaatgctgagcaagaaggctgaaattgcaatgaatatgggtgaaactcgtattatttccagtgctattctttcagccatagatgaagactcacccagggagaagatttactatgtatttgaaaggcttccccaaaatgggcaacttcagcttaaggaatgtcaactaagatgtggaatatagcaattacctatgacggattagaggaagatgatgaggtctttgaagtaattctgaactcccctgtgaatgcagttcttggcacaaagacaaaagctgcagtgaaaattttggactcaaaaggaggacaatgccatccttcatattcctccaaccaaagcaagcacagcacatgggagaagggcatttggcatctgctgcccccagggtcttcctcatccaccacttctggttcctttcatctggaaagaagacctcttccatcttccatgcagctagcagtcatcaggggagacaccctgcggggctttgattctacagatctttctcaaaggaagcttaggacccgtgggaatggcaaaacagttcgtccatcctctgtttatagaaatggaacagacatcatctataattatcatgggatagtttccttgaaactggaggatgacagtttcccaactcacaaaaggaaggccaaagtatccatcattagtcagccacaaaagacaatcaaagtggcagaactgcctcaagcagataaggtggaatccacaactgactcacacttccccagacaggaccagttgccctcatttccaaagaactgcactctggaattaaagggactcttccattttgaagaaggcatccagaagctgtatcagtgcaatgggatcgcctggaaagcctggagtccccaaaccaaggatgtggaagacaaatcctgtccagccgggtggcaccagcactcaggctactgtcacatcttgatcacagagcagaaaggcacctggaatgcggctgcccaagcttgcagggaacaatacctgggcaaccttgtaactgtattctccaggcagcacatgcggtggctctgggacattggtgggagaaagtccttttggataggtttgaacgaccaagtgcatgctggccactgggagtggatcggtggtgaacctgttgccttcaccaatgggagaagagggccctctcaacgctccaagcttggaaagagctgtgttttggttcaaagacaagggaaatggcaaacaaaagactgtaggagagccaaacctcataattatgtgtgttccagaaaactctaaatataacagaccctacagggggccacctggagtttgtcacctatttattcacaggatctgtgaatattgctccatagaaaacaaattgttatgattgagtgggtatacctttgtgattctgtctagtgaaaatgggacatttttaatagtgccagaaagattgataaataaatattttttacaagat

SEQ ID NO: 3035 - DNA, 1438 bp, Artificial
  cDNA Sequence
gatgctggatgagtccttggcagtcaggaggtccaaaaaatgcaaagaaatgataatgcactgggagaagaaagaagatattgacatcgtgaacacagtagaccaattggacaaaacagctcctcgtatcacactcttgcattccccttctcaagtggggctcctgaaaaatggctgctacgggatttacatcacttcccgcgtgttgaaggcatcagaccctgacactgaggacgatcagatcatctttaaaattctacaaggcccaaaacatggacatctggagaacacaacaacaggtgaatttatccatgagaaatttagccaaaaggacttaaacagtaagactattctttacatcataaacccatctttggaagtaaattcagataccgtggaatttcaaatcatggaccccacagggaactcggccactcctcaaattttggaactgaagtggtctcatattgaatggtcacagaccgaatatgaagtctgtgagaatgtgggtttgttgcccttggaaattatcagaaggggatattccatggactcggcctttgtgggtataaaggtcaaccaagtgtcagctgcagttggaaaagatttcaccgtgattccatctaaactgattcagtttgacccagaggttcgtccatcctctgtttatagaaatggaacagacatcatctataattatcatgggatagtttccttgaaactggaggatgacagtttcccaactcacaaaaggaaggccaaagtatccatcattagtcagccacaaaagacaatcaaagtggcagaactgcctcaagcagataaggtggaatccacaactgactcacacttccccagacaggaccagttgccctcatttccaaagaactgcactctggaattaaagggactcttccattttgaagaaggcatccagaagctgtatcagtgcaatgggatcgcctggaaagcctggagtccccaaaccaagacaactgtttttcaggatgtggaagacaaatcctgtccagccgggtggcaccagcactcaggctactgtcacatcttgatcacagagcagaaaggcacctggaatgcggctgcccaagcttgcagggaacaatacctgggcaaccttgtaactgtattctccaggcagcacatgcggtggctctgggacattggtgggagaaagtccttttggataggtttgaacgaccaagtgcatgctggccactgggagtggatcggtggtgaacctgttgccttcaccaatgggagaagagggccctctcaacgctccaagcttggaaagagctgtgttttggttcaaagacaagggaaatggcaaacaaaagactgtaggagagccaaacctcataattatgtgtgttccagaaaactctaaatataacagaccctacagggggccacctgg

SEQ ID NO: 3036 - DNA, 2151 bp, Artificial
  cDNA Sequence
atggtgacacaagaatccatgctgaaggctgccttgcctctctttaccagattcatcatcagcaatggactgcggaccgagcacggggtgtttgagatcacactggagactgtggacagagccctgcctgtggtaaccaggaacaaggggttgagactggcccaaggggccgtgggcctgctttcccctgacctccttcagctgaccgaccctgatacacctgcggagaacctcaccttcctcttggttcagctcccccagcatggccagctctacctgtgggggacagggctacttcaacacaatttcacccagcaggatgtggacagcaagaatgtggcctatcggcactcaggaggggactcccagactgactgctttactttcatggccacagatgggacaaaccaaggctttattgtgaatgggagagtgtgggaagaacctgttttattcaccattcaggcaaaccaattggacaaaacagctcctcgtatcacactcttgcattccccttctcaagtggggctcctgaaaaatggctgctacgggatttacatcacttcccgcgtgttgaaggcatcagaccctgacactgaggacgatcagatcatctttaaaattctacaaggcccaaaacatggacatctggagaacacaacaacaggtgaatttatccatgagaaatttagccaaaaggacttaaacagtaagactattctttacatcataaacccatctttggaagtaaattcagataccgtggaatttcaaatcatggaccccacagggaactcggccactcctcaaattttggaactgaagtggtctcatattgaatggtcacagaccgaatatgaagtctgtgagaatgtgggtttgttgcccttggaaattatcagaaggggatattccatggactcggcctttgtgggtataaaggtcaaccaagtgtcagctgcagttggaaaagatttcaccgtgattccatctaaactgattcagtttgacccaggaatgtcaactaagatgtggaatatagcaattacctatgacggattagaggaagatgatgaggtctttgaagtaattctgaactcccctgtgaatgcagttcttggcacaaagacaaaagctgcagtgaaaattttggactcaaaaggaggacaatgccatccttcatattcctccaaccaaagcaagcacagcacatgggagaagggcatttggcatctgctgcccccagggtcttcctcatccaccacttctggttcctttcatctggaaagaagacctcttccatcttccatgcagctagcagtcatcaggggagacaccctgcggggctttgattctacagatctttctcaaaggaagcttaggacccgtgggaatggcaaaacagttcgtccatcctctgtttatagaaatggaacagacatcatctataattatcatgggatagtttccttgaaactggaggatgacagtttcccaactcacaaaaggaaggccaaagtatccatcattagtcagccacaaaagacaatcaaagtggcagaactgcctcaagcagataaggtggaatccacaactgactcacacttccccagacaggaccagttgccctcatttccaaagaactgcactctggaattaaagggactcttccattttgaagaaggcatccagaagctgtatcagtgcaatgggatcgcctggaaagcctggagtccccaaaccaaggatgtggaagacaaatcctgtccagccgggtggcaccagcactcaggctactgtcacatcttgatcacagagcagaaaggcacctggaatgcggctgcccaagcttgcagggaacaatacctgggcaaccttgtaactgtattctccaggcagcacatgcggtggctctgggacattggtgggagaaagtccttttggataggcaagttgaacgaccaagtgcatgctggccactgggagtggatcggtggtgaacctgttgccttcaccaatgggagaagagggccctctcaacgctccaagcttggaaagagctgtgttttggttcaaagacaagggaaatggcaaacaaaagactgtaggagagccaaacctcataattatgtgtgttccagaaaactctaa

SEQ ID NO: 3037 - DNA, 1176 bp, Artificial
  cDNA Sequence
atggcggcgcgttcgcctccctcaccgcacccttcgcccccagcgcgacagctgggccccaggtccccacgtgttgggcggggagctgaagtacacgcaatgcgcagcgaggcctcgggttttgccggcgcagcgcgggaggtggtcgcggacgaaagtgataaaatctgggtgggtgaagaagggtcagggggccggcgagggcctgggggggcagctccggctcatgctcccctcctcagcgcgcccatggggtccagacggctagagggcatctcggtagaggaggcgatggtgacccggacgcagctgctggaggaagagctgagcagcctaaaggaggagttggccctgtgtcaggctgataaagaatttgtatggtctttgtggaaacgtctccaggttacaaacccagatctcacacaagtggtcagtttggttgtggaaagagaaaaacagaaatctgaagctaaagacagaaaagttctagaaattctgcaagtcaaggatgccaaaatacaagaatttgaacagagagagtcagtactgaaacaggaaataaatgaccttgtaaaacggaaaattgcagtagatgaagaaaatgctttcttaaggaaagaattcagtgacttggagaagaaatttaaagataaaagtcaagaaattaaggacactaaggagtgtgtacagaacaaagaagagcaaaacagactagttataaaaaatctggaggaggaaaacaagaaattaagtacccgctgcactgacctgctaaatgacctggagaaattgaggaagcaggaagcacatttgagaaaagaaaaatatagcactgatgcaaaaataaagacctttgaagacaatttaattgaagcaaggaaagaagttgaagtatcacagagtaaatacaatgctctatcattacagttgagtaataaacagactgaacttatccagaaggatatggatattaccctggtcaggcaagaactgcaggagctgcagaatctttacaaacagaacagtacacatacagcccagcaagcagagctgatccagcagcttcaggttctcaatatggacacacaaaaagtactgagaaatcaggaagatgttcacacagctgaaagtatatcatatcaaaaagtatgcttttattctgtaataaagatgtaa

SEQ ID NO: 3038 - DNA, 3249 bp, Artificial
  cDNA Sequence
cttgctttgcacaggaaggaactgcaggagctgcagaatctttacaaacagaacagtacacatacagcccagcaagcagagctgatccagcagcttcaggttctcaatatggacacacaaaaagtactgagaaatcaggaagatgttcacacagctgaaagtatatcatatcaaaaactttacaatgagttacatatttgttttgaaaccacaaaatcaaatgaagctatgctccggcaaagtgttactaatcttcaggatcagctattacaaaaagagcaagaaaatgctaagttaaaagaaaaacttcaggaatcacagggagcacctcttcctttacctcaagaaagtgatccagactactcagcacaggtacctcatcgcccatccttatcaagcttagaaacgttaatggtttcacagaagtctgaaattgagtatttacaggagaaactaaagatagcaaatgaaaaactgtcagaaaacatatctgccaacaagggtttctcccgaaagagcatcatgacaagtgctgaaggaaaacataaggaaccacctgtgaaacgttcaaggtctttgtccccaaagagctctttcacagactcagaagagctacagaagctgagaaaagctgaaagaaagattgaaaacttagagaaggcactacaactaaagagccaagaaaatgatgagctaagagatgcccatgaaaaacgcaaggaacggctacagatgttacagaccaactacagagcagtaaaagagcaattaaaacagtgggaagaaggcagtggcatgactgaaatcaggaaaataaagagagcagatccccaacaacttcgacaagaagattctgacgctgtgtggaatgaactggcatatttcaaaagggaaaaccaggagctaatgattcaaaagatgaatcttgaagaagaattagatgaacttaaagtacatatatctattgataaggcagcaatacaagaattgaatagatgtgtggcagagagaagagaagaacagctctttagatctggtgaagatgatgaggtcaagaggagtactccagagaagaatggaaaagaaatgttggagcagacattacagaaggtcactgagttggaaaatcggctgaaatcttttgagaaaaggtcgagaaaattaaaagaagggaataaaaaattaatgaaagaaaatgattttctgaaatccctcttaaaacagcaacaagaagatacagagaccagagaaaaagagctagaacagataataaaggggagtaaagatgtagaaaaagaaaatactgaacttcaagtaaaaatcagtgagctggagacagaagtcacttccctgaggagacaagtggcagaagctaatgcattgagaaatgaaaatgaagagctgatcaacccaatggagaaatcacaccagtcagcagacagagctaaatccgagatggccaccatgaaagtgagatctggacgatatgattgtaagacaactatgaccaaggttaaatttaaagctgcgaagaaaaattgctctgtgggtcgtcaccacactgttctcaatcattccatcaaggttatgagcaatgtgtttgagaacctcagcaaggacggctgggaggatgtgagtgaaagcagcagtgattctgaagcacagacctctcaaactttgggaacaattattgtagaaacatcccagaaaataagtcctacggaagatggaaaagaccagaaagaaagtgatccaacagaagacagccaaacacaaggaaaagaaatagtacagacatatttaaatatagatggcaagaccccaaaggactattttcatgataagaatgccaaaaaaccaacttttcaaaagaagaattgcaagatgcaaaagagttcacatacagcagttcctactagagtcaacagagaaaagtacaaaaatataactgcccagaaatcaagtagcaatattattttattacgagaacggattatatccttgcaacaacaaaacagtgtacttcagaatgccaagaaaacagcagaattgtctgttaaagaatataaagaagttaatgaaaagctcctccatcaacagcaagtatccgatcaacgatttcagacaagcaggcagacaataaagaagctaaatttggatttggctgggcttcggaaagaaaaagaagatttactaaagaaattggagtcctcatctgaaatcacaagtttggcagaagaaaattcccaggtaacatttccacggatacaagttacatcacttagtccttcaaggagcatggatttggaaatgaagcaattgcagtataaactaaagaatgctactaatgaactcactaaacagtcatcaaatgtgaagactttgaaatttgaactcctagcaaaagaagaacacataaaggaaatgcatgaaaagatatctcgaatggagagggatataactatgaaaagacatttgatagaggacttgaaatttcgacagaaagtaaatttggaaagtaacaagagttttagtgaaatgttacaaaatcttgataaaaaggtaaagacattaactgaagaatgttccaacaagaaggtatcaattgattcactaaagcaaagacttaacgttgctgtaaaagaaaagtcacagtatgaacagatgtatcagaaatctaaagaggagttagaaaaaaaggatctcaagcttactctcctagtatcaagaataagtgagactgaatctgcaatggcagaaattgaaacagcagcatctaagcagcttcaagaattagcattgcaaagtgaacaggtcctagaaggtgcacagaagacattgctgttagccaatgaaaaagtagaagagttcaccacatttgtgaaggctttggccaaagagttgcaaaatgatgtccatgtggtaaggcgacaaataagagagcttaaaaaaatgaagaaaaacagggacgcctgtaaaacctcaacccataaagcccagaccttggcagcttctatcctgaacatttcacggtcagatttagaggaaatattagacacagaagatcaagtggaaattgaaaaaacaaaaattgatgctgaaaatgacaaggaatggatgttgtacattcagaaacttcttgaaggacagagtcttgctctgtctcccaggctgaagtgcaatggcgcaatcgtggctcaccaaaacctccgcctgccagactcgagcagttctgcctcagcctcctga

SEQ ID NO: 3039 - DNA, 1326 bp, Artificial
  cDNA Sequence
atgaaaaagaaaacattcaaaggattgatacgtatatttcggaaaggtgttattgctgttttggcagcaaacagactcaagattttgggccaatcatgtgcctctctttttacctggatggagagtttcaaagaaggcataggcatgttagtgtgcacaggagagccccaagacaagcataaatttccaaaacatcaaaaggagcagttgcgttgtttacaagcgctcagttggctcaccagttctgaccttcttgctgcaataatcagttctatggctgaattacaagacgtcattggtaaagcagatccaaattccagaatttgtggacatttactcataggtgcagccaagaattcttttgcaaaactcatggataaaattagtctggtaatggaatgtatacctctgcacagtagcaggagtattacatatgtagaaaaagattccctggttcagaggctggcccatggacttcataaagtaaacacactggccctgaaatatggtttgcgtggccatgtgcccattacgaaaagcacagcatcgttgcagaagcaaatacttggatttacacaaagactgcatgctgcagaagtggagcgccgctcactacgcttagaggtcacagaattcaaacgaagtgtgaatgaaatgaaaaaggagcttgacaaagcccagggtctgcaaatgcaattaaatgaatttaagcagtctaaattgatcacccatgagaagtttgaaagtgcatgtgaagaactaaataatgcattacttcgggaagagcaggcacaaatgctattgaatgaacaggcacaacaactacaggaattgaattataaacttgaattgcactccagtgaggaagctgacaaaaaccaaactcttggagaagctgttaagagtctctccgaggcaaagatggagctgagaagaaaagatcaatctctgcgtcagctcaatagacatcttacccagctggagcaggacaagcgtcgactggaggagaacatccatgatgcagagagtgccctccgcatggcagccaaagacaaagaatgtgttgctaatcacatgagagcagtagaaaatacgcttcacaaggtactagatcagatctcgctgtcatggtctgcggcaagtaggaatgacttcaccctacagctacccaaactgcacctggagacctttgcaatggaggggctcaagggcgggccagaggtggtagcatgccaggttagagtgcagtggtgtgatcatagctcactgcagtctcaaatgccagggctcaagcaatcttcctgcctcagcctgctgagtacctag

SEQ ID NO: 3040 - DNA, 838 bp, Artificial
  cDNA Sequence
atatttgaagcacagtgtggatgttaatgtgtggctaaactgagcaagaagaaaacattatgtagtctctccgaggcaaagatggagctgagaagaaaagatcaatctctgcgtcagctcaatagacatcttacccagctggagcaggacaagcgtcgactggaggagaacatccatgatgcagagagtgccctccgcatggcagccaaagacaaagaatgtgttgctaatcacatgagagcagtagaaaatacgcttcacaaggtactagatcagatctcgctgtcatggtctgcggcaagtaggaatgacttcaccctacagctacccaaactgcacctggagacctttgcaatggaggggctcaagggcgggccagaggtggtagcatgccaggctatgattaaaagtttcatggatgtctaccagcttgcaagcactagaatcatgacattagagaaggaaatgacatctcatcgaagtcacattgcagccttgaaatcagaacttcacacagcttgtttacgtgaaaatgcaagtttacaatcaataggatcacgagaccattcaaatctctccattccttcaagagctcctcttcctgctgacacaactggtattggggatttcttaccattgaaagctgaacttgatactacttacactttcttaaaggagacatttataaatactgtgccccatgctctgacatcatctcactcctctccagtgactatgtctgctaatgccaacagaccaactcagattggattatgacttcatgaaattaaaaaatggaggaagagttaacagtacaattaaaattgttttgaatggg

SEQ ID NO: 3041 - DNA, 3353 bp, Artificial
  cDNA Sequence
gggagccgcgcgggagcagcgcagctacggcggcggcagcggcggcgcggttgcgattccgagccgttgagacgcctctgcggcagctggtggcgcaggtggcttgcgtggacgcgggtagaggcgaccggccagcaaccgcagcgtcggcgcccgcggccccggcagcaggcgcgtcgggacgccccgaggcatcctcccccgcccgcgggcccggtagctgggcccgcgtccgccgcccgcatccccgcgccgccgcatctcctcgccgcctcccgggcttcggacccccggtctcgcccccgaaacatgactcgcgatttcaaacctggagacctcatcttcgccaagatgaaaggttatccccattggccagctcgagtagacgaagttcctgatggagctgtaaagccacccacaaacaaactacccattttcttttttggaactcatgagactgcttttttaggaccaaaggatatatttccttactcagaaaataaggaaaagtatggcaaaccaaataaaagaaaaggttttaatgaaggtttatgggagatagataacaatccaaaagtgaaattttcaagtcaacaggcagcaactaaacaatcaaatgcatcatctgatgttgaagttgaagaaaaggaaactagtgtttcaaaggaagataccgaccatgaagaaaaagccagcaatgaggatgtgactaaagcagttgacataactactccaaaagctgccagaagggggagaaagagaaaggcagaaaaacaagtagaaactgaggaggcaggagtagtgacaacagcaacagcatctgttaatctaaaagtgagtcctaaaagaggacgacctgcagctacagaagtcaagattccaaaaccaagaggcagacccaaaatggtaaaacagccctgtccttcagagagtgacatcattactgaagaggacaaaagtaagaaaaaggggcaagaggaaaaacaacctaaaaagcagcctaagaaggatgaagagggccagaaggaagaagataagccaagaaaagagccggataaaaaagaggggaagaaagaagttgaatcaaaaaggaaaaatttagctaaaacaggggttacttcaacctccgattctgaagaagaaggagatgatcaagaaggtgaaaagaagagaaaaggtgggaggaactttcagactgctcacagaaggaatatgctgaaaggccaacatgagaaagaagcagcagatcgaaaacgcaagcaagaggaacaaatggaaactgagcagcagaataaagatgaaggaaagaagccagaagttaagaaagtggagaagaagcgagaaacatcaatggattctcgacttcaaaggatacatgctgagattaaaaattcactcaaaattgataatcttgatgtgaacagatgcattgaggccttggatgaacttgcttcacttcaggtcacaatgcaacaagctcagaaacacacagagatgattactacactgaaaaaaatacggcgattcaaagttagtcaggtaatcatggaaaagtctacaatgttgtataacaagtttaagaacatgttcttggttggtgaaggagattccgtgatcacccaagtgctgaataaatctcttgctgaacaaagacagcatgaggaagcgaataaaaccaaagatcaagggaagaaagggccaaacaaaaagctagagaaggaacaaacagggtcaaagactctaaatggaggatctgatgctcaagatggtaatcagccacaacataacggggagagcaatgaagacagcaaagacaaccatgaagccagcacgaagaaaaagccatccagtgaagagagagagactgaaatatctctgaaggattctacactagataactaggttgacatacctggaatatagagaacacttgagaagtttgtaatggttttcatttgaaatagactgctgaaagttttaaatttttataagcataggtttgatgttgaaaacttgttttgagggagaaaatccctttgttttaaagtaaagtaaacattatcgctaagtgtacttgtgcagtattaacagctacattatacagtaaatgtgggataaaatccatttagaaaatgttaaactgcttttccagacatggttgtagcatattttcaattagtgtgtgtatgttaatgtgtaattgatagtagaacaaagttacatttttaaaactgctacttgtataaaccttgcctcttttcccaaatactgtgggttttgtgcatagtttttacaaaccttggatttaccagactgtcttttcactgtttgtgggttttgtagaagttacacatttttatggtagataaaatgttacttctatacaagtactcactccctttttatcaaaagttaattttaatctcacagtctacattgtgctacattatccagcttctttggaacaatgtgtgctctgtatggttttttttggtatgacaactaattaagcaactgacatggaactgagaattctacaaactataaaacattaatttttgaaggtaatttagttttgtggctgggcattcagtgaagtcttaggacttctttgcagacaactgactgggtatatataggaatgaatctggctttagggttaaatcatttaaggtccttttataggcaggcactagtaactaaaactgaaaactaagtaagtttatttttgaggaatgttgttaaaaatgtctttaggaagtcactaaaacttaattggaagaaaaaatcatgatgcttatacaataaatatgaataaatgttatataaggaaactcacctatttgaaatcatggctatattgtttttattttctagattccaaaaatacaaacactagttgttccagcattgtactttgataagtctgtacattgacgtgtatggactaaatccagggtaaaatcaatgttacaaaatttaagggtatgttaactaaaggatagcatttctaagatattttgaatattagggtcatttggcacttctcagcaagtaggatacttctcatgttttgaaattatatgaatatggaaaaaaatggcttaagaccagcgtctctgtatgacattgtgtggttgaccctctgagataactgttttcatctacagaattgcatttttgcttttaaagaggtcttataatggaactaggaatcaccgttttgagagaacctgcatatataccagtcattatctgtttggtccttatacagttttaacttacttagatttattctagttaagccataagttcaacgtgtaaacttgttttcattaaagaatttttctatc

SEQ ID NO: 3042 - DNA, 2453 bp, Artificial
  cDNA Sequence
atggcctgccgggaaatgtagtttctgatgccctgcccgcgccgcctcgccgctcgccggccgggcgccccaagcaactacaacttccatcacgctctgcgaggccttgatctgcaggcttttgcaggggaaggagtggggcgaacatggctgaaggaagccgaggtggccctacgtgtagcggggtgggtggcaggcaggacccagtctccggcagtggcggctgcaactttccagagtatgagcttcccgagctaaatacgcgcgctttccatgtgggcgcctttggggagctgtggcggggccgtctgcgcggggccggggacttgtcgctgagggagccgccggcatccgctctgcctgggagccaggcagctgactccgaccgggaggatgccgcggtggccagggatctggactgcagcctggaggcggcggctgagctgagggcggtgtgcggccttgataaactgaaatgccttgaggacggtgaggatccagaagtcattccggagaatactgacctggtgactttgggggttagaaaaaggttcttggaacatcgggaagaaaccattacaatagatcgagcctgcagacaagaaacattcgtttatgagatggagtcacatgccataggaaaaaagcctgaaaattcagcagacatgattgaagaaggggagcttatcctatctgtgaatatcttgtaccctgttatatttcataagcacaaagaacacaaaccataccaaacaatgctggtgttgggcagtcaaaaactcacacaactgagggattcaattcgatgtgtcagtgacctccagattggtggtgaattcagcaacactcctgaccaagcccctgagcacatcagcaaagacctatacaaatcagccttcttttattttgaaggaacattttataatgataaaagatacccagaatgcagagatttgagcagaactatcattgagtggtcagagtcccatgatagaggctatggaaagtttcagactgctagaatggaagatttcaccttcaatgacttgtgtattaaactgggttttccttacttatactgtcatcagggagactgtgaacatgtcattgtcattactgacataaggcttgtgcatcatgatgactgcttggataggacattgtatcccctccttatcaagaagcattggctatggaccagaaaatgttttgtttgtaaaatgtatacagccagatgggtgacgaacaatgacagttttgcaccagaggacccatgcttcttttgtgatgtttgcttccgaatgctgcactatgattcagaaggcaacaaactgggggaattccttgcttatccttatgttgatcctggaacctttaattaagaatagctacactcacaaaaataccccctcatgaaataactgttctcttggatggttaccttatttctaagaaacgccactgaggaacaggatccactttgaacagtccgctaaagctatcaaaaaaaagtccaaatgacagattttcttataatgatagtatttaaatgtttataacatagtttaattttatatttattccagatagtatttaatttagtgctttttacccattttgagttgagttgtagtactttatatattctgactttaaatcctttgtcagacacacatattctttctcccaatccatgccttccctattcattctctgtccagagttttttgctaaagatagaattattaatgatacatcaagtagtggaagtgttttgaaaattctttgaagaatgtgagagctacaccttctaccatgaggcttccaaggttgtatttaaatttgactgaatatctggatggctaagaacagacatttatcttacacatggaaaactgacgaaacctataagcctatgtgtttgacagtgaagtatgttttatggacttaaatgccacaaacagttaagtccattggcttggagatgacaagcacgagtttctgagcatcctttttctggccaatcggacaaaatagagttagcaaagccctcacagcaccctatgaaaaatctctgctcttatacaggattagatgcagacctcatcttgacctaacatctgtaaccaggtatgtcaacctagttatctagtgtagaatccttcagagatatttcagtctctctctcttcactggatggcctgaagaaaagggggaaaggtacaactggaattaggattttctcctgatgaaggaaaaaaagacattaagtctgcattatatttttaaacccatgaaaagactgaaaccaaccaaacaaaagaaaaacttgacttgttattagaacagtcattattatttttttcttcttcaaaactgttattttaccatgttgtatcttcttcccaaagtaatatgcagatgaagcaaaataactcagcaaagtgtcatgg

SEQ ID NO: 3043 - DNA, 2520 bp, Artificial
  cDNA Sequence
gtggggcgaacatggctgaaggaagccgaggtggccctacgtgtagcggggtgggtggcaggcaggacccagtctccggcagtggcggctgcaactttccagagtatgagcttcccgagctaaatacgcgcgctttccatgtgggcgcctttggggagctgtggcggggccgtctgcgcggggccggggacttgtcgctgagggagccgccggcatccgctctgcctgggagccaggcagctgactccgaccgggaggatgccgcggtggccagggatctggactgcagcctggaggcggcggctgagctgagggcggtgtgcggccttgataaactgaaatgccttgaggacggtgaggatccagaagtcattccggagaatactgacctggtgactttgggggttagaaaaaggttcttggaacatcgggaagaaaccattacaatagatcgagcctgcagacaagaaacattcgtttatgagatggagtcacatgccataggaaaaaagcctgaaaattcagcagacatgattgaagaaggggagcttatcctatctgtgaatatcttgtaccctgttatatttcataagcacaaagaacacaaaccataccaaacaatgctggtgttgggcagtcaaaaactcacacaactgagggattcaattcgatgtgtcagtgacctccagattggtggtgaattcagcaacactcctgaccaagcccctgagcacatcagcaaagacctatacaaatcagccttcttttattttgaaggaacattttataatgataaaagatacccagaatgcagagatttgagcagaactatcattgagtggtcagagtcccatgatagaggctatggaaagtttcagactgctagaatggaagatttcaccttcaatgacttgtgtattaaactgggttttccttacttatactgtcatcagggagactgtgaacatgtcattgtcattactgacataaggcttgtgcatcatgatgactgcttggataggacattgtatcccctccttatcaagaagcattggctatggaccagaaaatgttttgtttgtaaaatgtatacagccagatgggtgacgaacaatgacagttttgcaccagaggacccatgcttcttttgtgatgtttgcttccgaatgctgcactatgattcagaaggcaacaaactgggggaattccttgcttatccttatgttgatcctggaacctttaattaagaatagctacactcacaaaaataccccctcatgaaataactgttctcttggatggttaccttatttctaagaaacgccactgaggaacaggatccactttgaacagtccgctaaagctatcaaaaaaaagtccaaatgacagattttcttataatgatagtatttaaatgtttataacatagtttaattttatatttattccagatagtatttaatttagtgctttttacccattttgagttgagttgtagtactttatatattctgactttaaatcctttgtcagacacacatattctttctcccaatccatgccttccctattcattctctgtccagagttttttgctaaagatagaattattaatgatacatcaagtagtggaagtgttttgaaaattctttgaagaatgtgagagctacaccttctaccatgaggcttccaaggttgtatttaaatttgactgaatatctggatggctaagaacagacatttatcttacacatggaaaactgacgaaacctataagcctatgtgtttgacagtgaagtatgttttatggacttaaatgccacaaacagttaagtccattggcttggagatgacaagcacgagtttctggtatgtctagtgttctcattcactgattcagtcagtacacagataatcagtatagagaacttaagaggctggcttatgttatacctaaatttttactttcttgtatacaacaatgctaaaattgagcagattgataactgccagcaaaccatagatttaagataaatgaatgatttacccaaccctaaaattccatgggtaaaaattttgattcctttattttcaatactgcgttccttataggtcttacatgcatatgcaaggatattttatcttattcattcatttcatactctcaaaacaccaaacttcaaaaagttaattattgtcataatgcattattccatgtgtggtgtcaatacattttagcggacaaagaagaaacatgccagttaaaacatttctgctactgggattctttattaattatttgagaatgttattttgctagttcttaaggttaagtttttcatcaaagactcaggtacctattattgttccctggtgaaactgaggagaaaagttaatcaaccaggttactcccacagtttgcccgtgtgttatgtatcagttatacaggtatcccaccaagttcaagtcaaaagaaattcctaactttgtatatttctggagctataaaacccctgattt

SEQ ID NO: 3044 - DNA, 2409 bp, Artificial
  cDNA Sequence
tttttctttttgaatttattttcatttagatgggcgtcccccccacctcccgtttccacctcttctaggggtgtaactatagcgttagtatgttgggtagggtcttttgggttcgcttctaaggccctgcgcgattctgtctgcaggttttatattggtctgtgcagtttgacctggagatcttctcactcagatatggcaacaagcagccttcactttgcatcatgtgatacacaacaggcgcccagacagcgcggagcgtctactgtcagcagttcatcatcaaccaaggtggatctcaagagtggcctcgaagaatgtgctgtggcattgaacttatttctaagcaacaaatttacagacgccttagaattgcttcgcccctgggctaaggagagtatgtaccatgccttgggctacagtaccattgtggtgttgcaggctgtcctgaccttcgagcaacaggacatccagaacggcatttctgccatgaaggacgctttacaaacctgccaaaaatacaggaaaaaatacacagttgtagaatctttctcaagtcttctttctagaggatccctggagcaactgagtgaagaggaaatgcatgctgaaatctgttatgccgagtgtctcctacagaaagctgcactcacgtttgtgcaggatgaaaatatgatcaacttcatcaaaggtggactcaaaattagaacaagttaccaaatatataaagaatgtctttctatcctgcatgaaattcagaagaacaaacttcagcaggaattcttctatgagtttgaagggggtgtcaagcttggcagtggggcctttaatttgatgctgtcccttttaccagcaaggattatcagactactagaatttattggattttctgggaatagggagttgggcctcctgcagttacgtgaaggtgcttcaggaaggagcatgaggtctgcactgtgctgcttaaccatcttagcttttcatacttacatctccctaatacttggtacaggagaagtgaatgttgcggaagcagagcgtctcctggcacccttcctccagcagtttccaaatggctcactcgtgttgttttatcatgcccgaatagagttgctgaaagggaatcttgaagaggcacaagaagtatttcaaaaatgcatttcagttcaagaagaatggaaacagtttcaccatctctgctactgggagctaatgtggattaatgttttccaacaaaactggatgcaggcatattactattcagatctgctttgcaaagagagtaaatggtccaaggcaacttatgtgttcttgaaagcagcaattttgagtatgcttccagaggaggatgtagtagcaacgaatgagaatgtggtaactttattcagacaggtggacagcttgaagcagagaattgccgggaaatctatccctactgagaagtttgctgtgaggaaggctcggcgttactccgcctccttacctgcacctgtgaagctcatcttacctgccctggaaatgatgtatgtctggaatggtttttcaatagtgagcaaaagaaaagacctttctgaaaatctgttagtaactgttgaaaaagctgaggcagctttacaaagtcaaaattttaacagcttctctgtggatgatgagtgcttagtgaagttacttaaaggatgttgcctcaagaacttacagcggcccttgcaagctgaactatgttacaatcatgttgtggaaagtgaaaagctactgaagtatgaccactacctagtgccgttcactctatttgaattggcatctttgtataaaagccagggggaaattgacaaggccataaagttcctagaaactgcaaggaacaactacaaagattactccctggagtccagactacacttcagaattcaggcagctcttcacctctggagaaaaccttcctcagattgatcagaacttgaaggatggaatttttcctcaattagcatcggcatctgctatagattcaaccttatattaaagtggaaaaatgatcttgtgaataagagacaaaaaaacagtttttttggtcaatattttctatcatctgagagatttactgttggtctacataattttttttcctatggaatggcattctatattatctagaaaattcttatattttgcctcccccaaaagaatttcatattatttgaattagggggcgaagaagtcttttgaaagacttgcagatgcaatagtctaattagattatttatttttttaatgtgaaaattaatattgtttagcaaatagcttacaagttgagccaattttggatttgttgggtagttaaacttcagagatattttgttgcctgtatttaaatttcagaagataaataaatatcattgcatttaaaat

SEQ ID NO: 3045 - DNA, 2434 bp, Artificial
  cDNA Sequence
acccggagggagcgccgggccgtccccttttgccctcctttgcgctgggctgagcccagagccgagagcaggagtcggctctgagttccctgcttggtttttgggtggcagcagccagaggaggaatatggcgctcttaggcagccgagcggagctggaagcggacgaggacgttttcgaagatgccttggaaaccatctcaatatcttctcactcagatatggcaacaagcagccttcactttgcatcatgtgatacacaacaggcgcccagacagcgcggagcgtctactgtcagcagttcatcatcaaccaaggtggatctcaagagtggcctcgaagaatgtgctgtggcattgaacttatttctaagcaacaaatttacagacgccttagaattgcttcgcccctgggctaaggagagtatgtaccatgccttgggctacagtaccattgtggtgttgcaggctgtcctgaccttcgagcaacaggacatccagaacggcatttctgccatgaaggacgctttacaaacctgccaaaaatacaggaaaaaatacacagttgtagaatctttctcaagtcttctttctagaggatccctggagcaactgagtgaagaggaaatgcatgctgaaatctgttatgccgagtgtctcctacagaaagctgcactcacgtttgtgcaggatgaaaatatgatcaacttcatcaaaggtggactcaaaattagaacaagttaccaaatatataaagaatgtctttctatcctgcatgaaattcagaagaacaaacttcagcaggaattcttctatgagtttgaagggggtgtcaagcttggcagtggggcctttaatttgatgctgtcccttttaccagcaaggattatcagactactagaatttattggattttctgggaatagggagttgggcctcctgcagttacgtgaaggtgcttcaggaaggagcatgaggtctgcactgtgctgcttaaccatcttagcttttcatacttacatctccctaatacttggtacaggagaagtgaatgttgcggaagcagagcgtctcctggcacccttcctccagcagtttccaaatggctcactcgtgttgttttatcatgcccgaatagagttgctgaaagggaatcttgaagaggcacaagaagtatttcaaaaatgcatttcagttcaagaagaatggaaacagtttcaccatctctgctactgggagctaatgtggattaatgttttccaacaaaactggatgcaggcatattactattcagatctgctttgcaaagagagtaaatggtccaaggcaacttatgtgttcttgaaagcagcaattttgagtatgcttccagaggaggatgtagtagcaacgaatgagaatgtggtaactttattcagacaggtggacagcttgaagcagagaattgccgggaaatctatccctactgagaagtttgctgtgaggaaggctcggcgttactccgcctccttacctgcacctgtgaagctcatcttacctgccctggaaatgatgtatgtctggaatggtttttcaatagtgagcaaaagaaaagacctttctgaaaatctgttagtaactgttgaaaaagctgaggcagctttacaaagtcaaaattttaacagcttctctgtggatgatgagtgcttagtgaagttacttaaaggatgttgcctcaagaacttacagcggcccttgcaagctgaactatgttacaatcatgttgtggaaagtgaaaagctactgaagtatgaccactacctagtgccgttcactctatttgaattggcatctttgtataaaagccagggggaaattgacaaggccataaagttcctagaaactgcaaggaacaactacaaagattactccctggagtccagactacacttcagaattcaggcagctcttcacctctggagaaaaccttcctcagattgatcagaacttgaaggatggaatttttcctcaattagcatcggcatctgctatagattcaaccttatattaaagtggaaaaatgatcttgtgaataagagacaaaaaaacagtttttttggtcaatattttctatcatctgagagatttactgttggtctacataattttttttcctatggaatggcattctatattatctagaaaattcttatattttgcctcccccaaaagaatttcatattatttgaattagggggcgaagaagtcttttgaaagacttgcagatgcaatagtctaattagattatttatttttttaatgtgaaaattaatattgtttagcaaatagcttacaagttgagccaattttggatttgttgggtagttaaacttcagagatattttgttgcctgtatttaaatttcagaagataaataaatatcattgcatttaaaat

SEQ ID NO: 3046 - DNA, 105 bp, Artificial
  cDNA Sequence
atggcatcatcatcatcctctgatgtttgcaaactaagagttgatgtgtttgatcaggttagtgaatctgtcaggtatggcattctgcctgtttctgaagcttaa

SEQ ID NO: 3047 - DNA, 2578 bp, Artificial
  cDNA Sequence
gaatgatcaaacacccaatagaaatgccctgaccagcattactaatgtggagcccaaaaccgagccagcctgtgtctctcccattcagaattctgccccagtcagtgatctaaccaaaactgaacacccaaaaagctcattccggattcatcggatgagaaggatggggtcagcctctaggaaaggaagagtgttctgtaatgcatgtgggaagacattctatgacaaaggtactctcaaaattcattacaatgctgttcacctgaagatcaaacatcgatgcaccattgaaggttgcaacatggtctttagctccctccgaagtcgtaatcgccacagtgcaaaccccaatcctcgccttcacatgcctatgctaaggaataaccgagataaagatttaattcgggccacctcaggagctgccacccctgtcatagcaagtacaaaatcaaatctggcactcacaagccctggccgacccccaatgggttttaccactccccctctagaccctgtcttgcaaaatcctctccctagccagctagtattttctgggctaaagactgtacaaccagttcctccattttatagaagtttactcactccaggggaaatggtgagtcctccaacctccctcccaaccagtcccatcattccaaccagtggtaccatagagcagcaccccccgccaccctctgagccagtagtgccagcagtgatgatggccacccatgagcccagtgctgacctggcacccaagaaaaagcccaggaagtcaagcatgcctgtgaagattgagaaggaaattattgataccgccgatgagtttgatgatgaagatgatgaccccaatgatggtggagctgtggtcaatgacatgagccatgacaatcattgtcactcccaagaggagatgagcccaggcatgtctgtgaaggacttttctaagcataacaggacccggtgcatttcaaggactgaaataaggagggccgacagcatgacttctgaagaccaagaacctgagcgggactatgagaacgagtctgagtcttcggagcccaaactgggcgaggaatccatggaaggggatgagcacattcacagcgaagtgagtgaaaaagtcctgatgaatagtgagaggcctgatgagaaccacagtgagccctctcaccaggacgtcatcaaggtgaaggaagaatttacagaccccacttacgacatgttttacatgagccagtatggactgtacaatggtgggggtgccagcatggccgccttgcatgagagctttacatcgtctctgaattatggcagccctcaaaagttctccccagaaggtgacctatgttctagcccagaccccaaaatctgttatgtgtgcaagaagagtttcaaaagctcctacagtgtgaaacttcactacaggaacgttcacttgaaagagatgcacgtctgcacagtggctggttgcaatgctgcattcccctctcgccgaagccgagacagacacagtgccaacataaacctacatcgtaaactgttgaccaaagaactcgatgacatgggcctggactcgtcgcagccctcccttagcaaggacctccgcgatgaatttttggtgaagatatatggtgcccagcaccccatggggctcgatgtcagggaagacgcctcctctcccgcagggactgaagactcccacctgaacgggtatgggagaggcatggcagaggactacatggtccttgacttgagcaccacctccagcctccagtccagcagcagtatccattcctccagagaatccgacgcaggcagcgatgaggggattcttctcgatgacattgacggggcgagtgacagtggggagtcggcacacaaggccgaggcccctgccctccctggcagcctaggggctgaagtttcaggatctcttatgttcagcagcttgtctgggagcaatggtgggatcatgtgcaacatttgccacaaaatgtacagcaacaaggggaccctgagagtgcactacaaaactgtgcatttgagagaaatgcacaagtgcaaagtcccaggttgcaatatgatgttttcctctgtacgaagccgaaatcggcacagtcagaaccctaatctccacaaaaacattcccttcacttcagtagattagtctcagaatggacactacaaatgccagctctcaccagatggcctacgtgtttgaactgccatagtcagtgtgcgcttatgtacttggggtgtgtgtgtgtgtgtgtgtgtgtgtgcatttatgtatgctctgtggctacatatacacacacgtatttccttgagataaacaagataaacactaggtgcttttgaatttttttcacttccctttatagttttgggaaaggagtgggatctttgatttcagggtgaaaacagagtacccctttaaacacacacacacacacatgcacatacacacacacacacacacacacacacagtgtgcaactagccccagttttgacagaataattcttggtcttccccaaagagacaatttgttgtacccatgactgttgcctgc

SEQ ID NO: 3048 - DNA, 1428 bp, Artificial
  cDNA Sequence
atgagaaggatggggtcagcctctaggaaaggaagagtgttctgtaatgcatgtgggaagacattctatgacaaaggtactctcaaaattcattacaatgctgttcacctgaagatcaaacatcgatgcaccattgaaggttgcaacatggtctttagctccctccgaagtcgtaatcgccacagtgcaaaccccaatcctcgccttcacatgcctatgctaaggaataaccgagataaagatttaattcgggccacctcaggagctgccacccctgtcatagcaagtacaaaatcaaatctggcactcacaagccctggccgacccccaatgggttttaccactccccctctagaccctgtcttgcaaaatcctctccctagccagctagtattttctgggctaaagactgtacaaccagttcctccattttatagaagtttactcactccaggggaaatggtgagtcctccaacctccctcccaaccagtcccatcattccaaccagtggtaccatagagcagcaccccccgccaccctctgagccagtagtgccagcagtgatgatggccacccatgagcccagtgctgacctggcacccaagaaaaagcccaggaagtcaagcatgcctgtgaagattgagaaggaaattattgataccgccgatgagtttgatgatgaagatgatgaccccaatgatggtggagctgtggtcaatgacatgagccatgacaatcattgtcactcccaagaggagatgagcccaggcatgtctgtgaaggacttttctaagcataacaggacccggtgcatttcaaggactgaaataaggagggccgacagcatgacttctgaagaccaagaacctgagcgggactatgagaacgagtctgagtcttcggagcccaaactgggcgaggaatccatggaaggggatgagcacattcacagcgaagtgagtgaaaaagtcctgatgaatagtgagaggcctgatgagaaccacagtgagccctctcaccaggacgtcatcaaggtgaaggaagaatttacagaccccacttacgacatgttttacatgagccagtatggactgtacaatggtgggggtgccagcatggccgccttgcatgagagctttacatcgtctctgaattatggcagccctcaaaagttctccccagaaggtgacctatgttctagcccagaccccaaaatctgttatgtgtgcaagaagagtttcaaaagctcctacagtgtgaaacttcactacaggaacgttcacttgaaagagatgcacgtctgcacagtggctggttgcaatgctgcattcccctctcgccgaagccgagacagatactgggagaagagcaatgagcaaaacggtctccttgtatcatggggagagactctgtcaagcctaaagtga

SEQ ID NO: 3049 - DNA, 998 bp, Artificial
  cDNA Sequence
gtccctcagcgaaggcgcgctgcttggcgggcgggctcttccaatccgagccagcgttctcggagacctcaaatcatctaacgtgaagccacagacatcttgggcaattttaatcatcaagaaagaaatatgtcattaagaaatagcagggtattttgaaagagttggaaaacatcatgaatttgaatacttcaagtaatactggtgatacccaaaggttgaagattgcctcattggatgtaaaacaaatacttaaaaatgaaacagagttggatattactgataatctcaggaagaaactccattgggctaaaaaagaaaagttagaaataacaaccaaacacaatgcagagctggcaagctatgagagccagattgccaagctacggtccgaggttgaaaagggagaagcattgcgacaaagtctggaatatgacctagctgttgctagaaaggaagctggtcttggaagacgggctgctgaagaaagattagccgaggcacataggatccaagaaaaactctgtgcacagaattcagaacttcaagcaaagacaaatgagactgagaaagcatttcagacttctcagcaaaaatggaaagaagaatgcagaagatttgaacatgatttggaggaaagagacaatatgatccaaaattgcaatcgagaatatgatttacttatgaaagaaaaaagcagactagagaaaactctacaggaagcgttggaaaaacatcaacgggagaagaatgagatggagtctcatatcagggagacagcattggaggagtttagattacaagaagaacaatgggaagcagaaagaagagaattacaatttatagtacaggagcaagatactgctgtgcaaaatatgcataagaaagtagaaaaattagaaacagaacatatggactgctctgaccttttacggcgacaaacaagtgaacttgaatttagcactcaacgagaggaacgccttagaaaagaatttgag
